United States Patent Application Publication US 2024/0294917 A1 - sequence listing, part 2

SEQ ID NO: 15300 - RNA, 21 nt, synthetic construct
  misc_feature 1..21: note = Synthetic
  source 1..21: mol_type = other RNA
cctttccggtggccgggcacc

SEQ ID NO: 15301 - RNA, 22 nt, synthetic construct
  misc_feature 1..22: note = Synthetic
  source 1..22: mol_type = other RNA
gcctttccggtggccgggcacc

SEQ ID NO: 15302 - RNA, 23 nt, synthetic construct
  misc_feature 1..23: note = Synthetic
  source 1..23: mol_type = other RNA
ggcctttccggtggccgggcacc

SEQ ID NO: 15303 - RNA, 24 nt, synthetic construct
  misc_feature 1..24: note = Synthetic
  source 1..24: mol_type = other RNA
tggcctttccggtggccgggcacc

SEQ ID NO: 15304 - RNA, 18 nt, synthetic construct
  misc_feature 1..18: note = Synthetic
  source 1..18: mol_type = other RNA
atcggcgcatcaccgacc

SEQ ID NO: 15305 - RNA, 19 nt, synthetic construct
  misc_feature 1..19: note = Synthetic
  source 1..19: mol_type = other RNA
catcggcgcatcaccgacc

SEQ ID NO: 15306 - RNA, 21 nt, synthetic construct
  misc_feature 1..21: note = Synthetic
  source 1..21: mol_type = other RNA
cccatcggcgcatcaccgacc

SEQ ID NO: 15307 - RNA, 22 nt, synthetic construct
  misc_feature 1..22: note = Synthetic
  source 1..22: mol_type = other RNA
gcccatcggcgcatcaccgacc

SEQ ID NO: 15308 - RNA, 23 nt, synthetic construct
  misc_feature 1..23: note = Synthetic
  source 1..23: mol_type = other RNA
cgcccatcggcgcatcaccgacc

SEQ ID NO: 15309 - RNA, 24 nt, synthetic construct
  misc_feature 1..24: note = Synthetic
  source 1..24: mol_type = other RNA
acgcccatcggcgcatcaccgacc

SEQ ID NO: 15310 - RNA, 18 nt, synthetic construct
  misc_feature 1..18: note = Synthetic
  source 1..18: mol_type = other RNA
aggcgggcaaggactacc

SEQ ID NO: 15311 - RNA, 19 nt, synthetic construct
  misc_feature 1..19: note = Synthetic
  source 1..19: mol_type = other RNA
gaggcgggcaaggactacc

SEQ ID NO: 15312 - RNA, 21 nt, synthetic construct
  misc_feature 1..21: note = Synthetic
  source 1..21: mol_type = other RNA
tggaggcgggcaaggactacc

SEQ ID NO: 15313 - RNA, 22 nt, synthetic construct
  misc_feature 1..22: note = Synthetic
  source 1..22: mol_type = other RNA
ctggaggcgggcaaggactacc

SEQ ID NO: 15314 - RNA, 23 nt, synthetic construct
  misc_feature 1..23: note = Synthetic
  source 1..23: mol_type = other RNA
cctggaggcgggcaaggactacc

SEQ ID NO: 15315 - RNA, 24 nt, synthetic construct
  misc_feature 1..24: note = Synthetic
  source 1..24: mol_type = other RNA
acctggaggcgggcaaggactacc

SEQ ID NO: 15316 - RNA, 18 nt, synthetic construct
  misc_feature 1..18: note = Synthetic
  source 1..18: mol_type = other RNA
gcaggcacgtggggtacc

SEQ ID NO: 15317 - RNA, 19 nt, synthetic construct
  misc_feature 1..19: note = Synthetic
  source 1..19: mol_type = other RNA
ggcaggcacgtggggtacc

SEQ ID NO: 15318 - RNA, 21 nt, synthetic construct
  misc_feature 1..21: note = Synthetic
  source 1..21: mol_type = other RNA
ccggcaggcacgtggggtacc

SEQ ID NO: 15319 - RNA, 22 nt, synthetic construct
  misc_feature 1..22: note = Synthetic
  source 1..22: mol_type = other RNA
gccggcaggcacgtggggtacc

SEQ ID NO: 15320 - RNA, 23 nt, synthetic construct
  misc_feature 1..23: note = Synthetic
  source 1..23: mol_type = other RNA
cgccggcaggcacgtggggtacc

SEQ ID NO: 15321 - RNA, 24 nt, synthetic construct
  misc_feature 1..24: note = Synthetic
  source 1..24: mol_type = other RNA
ccgccggcaggcacgtggggtacc

SEQ ID NO: 15322 - RNA, 18 nt, synthetic construct
  misc_feature 1..18: note = Synthetic
  source 1..18: mol_type = other RNA
ttattctgccggacaccc

SEQ ID NO: 15323 - RNA, 19 nt, synthetic construct
  misc_feature 1..19: note = Synthetic
  source 1..19: mol_type = other RNA
tttattctgccggacaccc

SEQ ID NO: 15324 - RNA, 21 nt, synthetic construct
  misc_feature 1..21: note = Synthetic
  source 1..21: mol_type = other RNA
gctttattctgccggacaccc

SEQ ID NO: 15325 - RNA, 22 nt, synthetic construct
  misc_feature 1..22: note = Synthetic
  source 1..22: mol_type = other RNA
ggctttattctgccggacaccc

SEQ ID NO: 15326 - RNA, 23 nt, synthetic construct
  misc_feature 1..23: note = Synthetic
  source 1..23: mol_type = other RNA
gggctttattctgccggacaccc

SEQ ID NO: 15327 - RNA, 24 nt, synthetic construct
  misc_feature 1..24: note = Synthetic
  source 1..24: mol_type = other RNA
agggctttattctgccggacaccc

SEQ ID NO: 15328 - RNA, 18 nt, synthetic construct
  misc_feature 1..18: note = Synthetic
  source 1..18: mol_type = other RNA
tgatcgtggcccagaccc

SEQ ID NO: 15329 - RNA, 19 nt, synthetic construct
  misc_feature 1..19: note = Synthetic
  source 1..19: mol_type = other RNA
gtgatcgtggcccagaccc

SEQ ID NO: 15330 - RNA, 21 nt, synthetic construct
  misc_feature 1..21: note = Synthetic
  source 1..21: mol_type = other RNA
acgtgatcgtggcccagaccc

SEQ ID NO: 15331 - RNA, 22 nt, synthetic construct
  misc_feature 1..22: note = Synthetic
  source 1..22: mol_type = other RNA
tacgtgatcgtggcccagaccc

SEQ ID NO: 15332 - RNA, 23 nt, synthetic construct
  misc_feature 1..23: note = Synthetic
  source 1..23: mol_type = other RNA
gtacgtgatcgtggcccagaccc

SEQ ID NO: 15333 - RNA, 24 nt, synthetic construct
  misc_feature 1..24: note = Synthetic
  source 1..24: mol_type = other RNA
cgtacgtgatcgtggcccagaccc

SEQ ID NO: 15334 - RNA, 18 nt, synthetic construct
  misc_feature 1..18: note = Synthetic
  source 1..18: mol_type = other RNA
cccgaagtgtggcacccc

SEQ ID NO: 15335 - RNA, 19 nt, synthetic construct
  misc_feature 1..19: note = Synthetic
  source 1..19: mol_type = other RNA
tcccgaagtgtggcacccc

SEQ ID NO: 15336 - RNA, 21 nt, synthetic construct
  misc_feature 1..21: note = Synthetic
  source 1..21: mol_type = other RNA
attcccgaagtgtggcacccc

SEQ ID NO: 15337 - RNA, 22 nt, synthetic construct
  misc_feature 1..22: note = Synthetic
  source 1..22: mol_type = other RNA
tattcccgaagtgtggcacccc

SEQ ID NO: 15338 - RNA, 23 nt, synthetic construct
  misc_feature 1..23: note = Synthetic
  source 1..23: mol_type = other RNA
ttattcccgaagtgtggcacccc

SEQ ID NO: 15339 - RNA, 24 nt, synthetic construct
  misc_feature 1..24: note = Synthetic
  source 1..24: mol_type = other RNA
tttattcccgaagtgtggcacccc

SEQ ID NO: 15340 - RNA, 18 nt, synthetic construct
  misc_feature 1..18: note = Synthetic
  source 1..18: mol_type = other RNA
ccgtcgcctgccgacccc

SEQ ID NO: 15341 - RNA, 19 nt, synthetic construct
  misc_feature 1..19: note = Synthetic
  source 1..19: mol_type = other RNA
gccgtcgcctgccgacccc

SEQ ID NO: 15342 - RNA, 21 nt, synthetic construct
  misc_feature 1..21: note = Synthetic
  source 1..21: mol_type = other RNA
acgccgtcgcctgccgacccc

SEQ ID NO: 15343 - RNA, 22 nt, synthetic construct
  misc_feature 1..22: note = Synthetic
  source 1..22: mol_type = other RNA
gacgccgtcgcctgccgacccc

SEQ ID NO: 15344 - RNA, 23 nt, synthetic construct
  misc_feature 1..23: note = Synthetic
  source 1..23: mol_type = other RNA
agacgccgtcgcctgccgacccc

SEQ ID NO: 15345 - RNA, 24 nt, synthetic construct
  misc_feature 1..24: note = Synthetic
  source 1..24: mol_type = other RNA
gagacgccgtcgcctgccgacccc

SEQ ID NO: 15346 - RNA, 18 nt, synthetic construct
  misc_feature 1..18: note = Synthetic
  source 1..18: mol_type = other RNA
cgtcgcctgccgaccccc

SEQ ID NO: 15347 - RNA, 19 nt, synthetic construct
  misc_feature 1..19: note = Synthetic
  source 1..19: mol_type = other RNA
ccgtcgcctgccgaccccc

SEQ ID NO: 15348 - RNA, 21 nt, synthetic construct
  misc_feature 1..21: note = Synthetic
  source 1..21: mol_type = other RNA
cgccgtcgcctgccgaccccc

SEQ ID NO: 15349 - RNA, 22 nt, synthetic construct
  misc_feature 1..22: note = Synthetic
  source 1..22: mol_type = other RNA
acgccgtcgcctgccgaccccc

SEQ ID NO: 15350 - RNA, 23 nt, synthetic construct
  misc_feature 1..23: note = Synthetic
  source 1..23: mol_type = other RNA
gacgccgtcgcctgccgaccccc

SEQ ID NO: 15351 - RNA, 24 nt, synthetic construct
  misc_feature 1..24: note = Synthetic
  source 1..24: mol_type = other RNA
agacgccgtcgcctgccgaccccc

SEQ ID NO: 15352 - RNA, 18 nt, synthetic construct
  misc_feature 1..18: note = Synthetic
  source 1..18: mol_type = other RNA
gtcgcctgccgacccccc

SEQ ID NO: 15353 - RNA, 19 nt, synthetic construct
  misc_feature 1..19: note = Synthetic
  source 1..19: mol_type = other RNA
cgtcgcctgccgacccccc

SEQ ID NO: 15354 - RNA, 21 nt, synthetic construct
  misc_feature 1..21: note = Synthetic
  source 1..21: mol_type = other RNA
gccgtcgcctgccgacccccc

SEQ ID NO: 15355 - RNA, 22 nt, synthetic construct
  misc_feature 1..22: note = Synthetic
  source 1..22: mol_type = other RNA
cgccgtcgcctgccgacccccc

SEQ ID NO: 15356 - RNA, 23 nt, synthetic construct
  misc_feature 1..23: note = Synthetic
  source 1..23: mol_type = other RNA
acgccgtcgcctgccgacccccc

SEQ ID NO: 15357 - RNA, 24 nt, synthetic construct
  misc_feature 1..24: note = Synthetic
  source 1..24: mol_type = other RNA
gacgccgtcgcctgccgacccccc

SEQ ID NO: 15358 - RNA, 18 nt, synthetic construct
  misc_feature 1..18: note = Synthetic
  source 1..18: mol_type = other RNA
ccccggccaagcgccccc

SEQ ID NO: 15359 - RNA, 19 nt, synthetic construct
  misc_feature 1..19: note = Synthetic
  source 1..19: mol_type = other RNA
tccccggccaagcgccccc

SEQ ID NO: 15360 - RNA, 21 nt, synthetic construct
  misc_feature 1..21: note = Synthetic
  source 1..21: mol_type = other RNA
cctccccggccaagcgccccc

SEQ ID NO: 15361 - RNA, 22 nt, synthetic construct
  misc_feature 1..22: note = Synthetic
  source 1..22: mol_type = other RNA
ccctccccggccaagcgccccc

SEQ ID NO: 15362 - RNA, 23 nt, synthetic construct
  misc_feature 1..23: note = Synthetic
  source 1..23: mol_type = other RNA
gccctccccggccaagcgccccc

SEQ ID NO: 15363 - RNA, 24 nt, synthetic construct
  misc_feature 1..24: note = Synthetic
  source 1..24: mol_type = other RNA
tgccctccccggccaagcgccccc

SEQ ID NO: 15364 - RNA, 18 nt, synthetic construct
  misc_feature 1..18: note = Synthetic
  source 1..18: mol_type = other RNA
attccccagagcagcccc

SEQ ID NO: 15365 - RNA, 19 nt, synthetic construct
  misc_feature 1..19: note = Synthetic
  source 1..19: mol_type = other RNA
gattccccagagcagcccc

SEQ ID NO: 15366 - RNA, 21 nt, synthetic construct
  misc_feature 1..21: note = Synthetic
  source 1..21: mol_type = other RNA
cggattccccagagcagcccc

SEQ ID NO: 15367 - RNA, 22 nt, synthetic construct
  misc_feature 1..22: note = Synthetic
  source 1..22: mol_type = other RNA
gcggattccccagagcagcccc

SEQ ID NO: 15368 - RNA, 23 nt, synthetic construct
  misc_feature 1..23: note = Synthetic
  source 1..23: mol_type = other RNA
cgcggattccccagagcagcccc

SEQ ID NO: 15369 - RNA, 24 nt, synthetic construct
  misc_feature 1..24: note = Synthetic
  source 1..24: mol_type = other RNA
tcgcggattccccagagcagcccc

SEQ ID NO: 15370 - RNA, 18 nt, synthetic construct
  misc_feature 1..18: note = Synthetic
  source 1..18: mol_type = other RNA
gctagacgccgccgcccc

SEQ ID NO: 15371 - RNA, 19 nt, synthetic construct
  misc_feature 1..19: note = Synthetic
  source 1..19: mol_type = other RNA
agctagacgccgccgcccc

SEQ ID NO: 15372 - RNA, 21 nt, synthetic construct
  misc_feature 1..21: note = Synthetic
  source 1..21: mol_type = other RNA
cgagctagacgccgccgcccc

SEQ ID NO: 15373 - RNA, 22 nt, synthetic construct
  misc_feature 1..22: note = Synthetic
  source 1..22: mol_type = other RNA
gcgagctagacgccgccgcccc

SEQ ID NO: 15374 - RNA, 23 nt, synthetic construct
  misc_feature 1..23: note = Synthetic
  source 1..23: mol_type = other RNA
cgcgagctagacgccgccgcccc

SEQ ID NO: 15375 - RNA, 24 nt, synthetic construct
  misc_feature 1..24: note = Synthetic
  source 1..24: mol_type = other RNA
ccgcgagctagacgccgccgcccc

SEQ ID NO: 15376 - RNA, 18 nt, synthetic construct
  misc_feature 1..18: note = Synthetic
  source 1..18: mol_type = other RNA
tccccggccaagcgcccc

SEQ ID NO: 15377 - RNA, 19 nt, synthetic construct
  misc_feature 1..19: note = Synthetic
  source 1..19: mol_type = other RNA
ctccccggccaagcgcccc

SEQ ID NO: 15378 - RNA, 21 nt, synthetic construct
  misc_feature 1..21: note = Synthetic
  source 1..21: mol_type = other RNA
ccctccccggccaagcgcccc

SEQ ID NO: 15379 - RNA, 22 nt, synthetic construct
  misc_feature 1..22: note = Synthetic
  source 1..22: mol_type = other RNA
gccctccccggccaagcgcccc

SEQ ID NO: 15380 - RNA, 23 nt, synthetic construct
  misc_feature 1..23: note = Synthetic
  source 1..23: mol_type = other RNA
tgccctccccggccaagcgcccc

SEQ ID NO: 15381 - RNA, 24 nt, synthetic construct
  misc_feature 1..24: note = Synthetic
  source 1..24: mol_type = other RNA
ctgccctccccggccaagcgcccc

SEQ ID NO: 15382 - RNA, 18 nt, synthetic construct
  misc_feature 1..18: note = Synthetic
  source 1..18: mol_type = other RNA
gcgttagccgagcgcccc

SEQ ID NO: 15383 - RNA, 19 nt, synthetic construct
  misc_feature 1..19: note = Synthetic
  source 1..19: mol_type = other RNA
cgcgttagccgagcgcccc

SEQ ID NO: 15384 - RNA, 21 nt, synthetic construct
  misc_feature 1..21: note = Synthetic
  source 1..21: mol_type = other RNA
gccgcgttagccgagcgcccc

SEQ ID NO: 15385 - RNA, 22 nt, synthetic construct
  misc_feature 1..22: note = Synthetic
  source 1..22: mol_type = other RNA
cgccgcgttagccgagcgcccc

SEQ ID NO: 15386 - RNA, 23 nt, synthetic construct
  misc_feature 1..23: note = Synthetic
  source 1..23: mol_type = other RNA
ccgccgcgttagccgagcgcccc

SEQ ID NO: 15387 - RNA, 24 nt, synthetic construct
  misc_feature 1..24: note = Synthetic
  source 1..24: mol_type = other RNA
gccgccgcgttagccgagcgcccc

SEQ ID NO: 15388 - RNA, 18 nt, synthetic construct
  misc_feature 1..18: note = Synthetic
  source 1..18: mol_type = other RNA
cctacaatgccgcgcccc

SEQ ID NO: 15389 - RNA, 19 nt, synthetic construct
  misc_feature 1..19: note = Synthetic
  source 1..19: mol_type = other RNA
acctacaatgccgcgcccc

SEQ ID NO: 15390 - RNA, 21 nt, synthetic construct
  misc_feature 1..21: note = Synthetic
  source 1..21: mol_type = other RNA
gcacctacaatgccgcgcccc

SEQ ID NO: 15391 - RNA, 22 nt, synthetic construct
  misc_feature 1..22: note = Synthetic
  source 1..22: mol_type = other RNA
ggcacctacaatgccgcgcccc

SEQ ID NO: 15392 - RNA, 23 nt, synthetic construct
  misc_feature 1..23: note = Synthetic
  source 1..23: mol_type = other RNA
aggcacctacaatgccgcgcccc

SEQ ID NO: 15393 - RNA, 24 nt, synthetic construct
  misc_feature 1..24: note = Synthetic
  source 1..24: mol_type = other RNA
caggcacctacaatgccgcgcccc

SEQ ID NO: 15394 - RNA, 18 nt, synthetic construct
  misc_feature 1..18: note = Synthetic
  source 1..18: mol_type = other RNA
gacatttacaaggtcccc

SEQ ID NO: 15395 - RNA, 19 nt, synthetic construct
  misc_feature 1..19: note = Synthetic
  source 1..19: mol_type = other RNA
ggacatttacaaggtcccc

SEQ ID NO: 15396 - RNA, 21 nt, synthetic construct
  misc_feature 1..21: note = Synthetic
  source 1..21: mol_type = other RNA
acggacatttacaaggtcccc

SEQ ID NO: 15397 - RNA, 22 nt, synthetic construct
  misc_feature 1..22: note = Synthetic
  source 1..22: mol_type = other RNA
gacggacatttacaaggtcccc

SEQ ID NO: 15398 - RNA, 23 nt, synthetic construct
  misc_feature 1..23: note = Synthetic
  source 1..23: mol_type = other RNA
tgacggacatttacaaggtcccc

SEQ ID NO: 15399 - RNA, 24 nt, synthetic construct
  misc_feature 1..24: note = Synthetic
  source 1..24: mol_type = other RNA
ctgacggacatttacaaggtcccc

SEQ ID NO: 15400 - RNA, 18 nt, synthetic construct
  misc_feature 1..18: note = Synthetic
  source 1..18: mol_type = other RNA
agcgtccggccgcagccc

SEQ ID NO: 15401 - RNA, 19 nt, synthetic construct
  misc_feature 1..19: note = Synthetic
  source 1..19: mol_type = other RNA
aagcgtccggccgcagccc

SEQ ID NO: 15402 - RNA, 21 nt, synthetic construct
  misc_feature 1..21: note = Synthetic
  source 1..21: mol_type = other RNA
ccaagcgtccggccgcagccc

SEQ ID NO: 15403 - RNA, 22 nt, synthetic construct
  misc_feature 1..22: note = Synthetic
  source 1..22: mol_type = other RNA
cccaagcgtccggccgcagccc

SEQ ID NO: 15404 - RNA, 23 nt, synthetic construct
  misc_feature 1..23: note = Synthetic
  source 1..23: mol_type = other RNA
gcccaagcgtccggccgcagccc

SEQ ID NO: 15405 - RNA, 24 nt, synthetic construct
  misc_feature 1..24: note = Synthetic
  source 1..24: mol_type = other RNA
cgcccaagcgtccggccgcagccc

SEQ ID NO: 15406 - RNA, 18 nt, synthetic construct
  misc_feature 1..18: note = Synthetic
  source 1..18: mol_type = other RNA
acctgtccaccaccgccc

SEQ ID NO: 15407 - RNA, 19 nt, synthetic construct
  misc_feature 1..19: note = Synthetic
  source 1..19: mol_type = other RNA
gacctgtccaccaccgccc

SEQ ID NO: 15408 - RNA, 21 nt, synthetic construct
  misc_feature 1..21: note = Synthetic
  source 1..21: mol_type = other RNA
acgacctgtccaccaccgccc

SEQ ID NO: 15409 - RNA, 22 nt, synthetic construct
  misc_feature 1..22: note = Synthetic
  source 1..22: mol_type = other RNA
tacgacctgtccaccaccgccc

SEQ ID NO: 15410 - RNA, 23 nt, synthetic construct
  misc_feature 1..23: note = Synthetic
  source 1..23: mol_type = other RNA
ctacgacctgtccaccaccgccc

SEQ ID NO: 15411 - RNA, 24 nt, synthetic construct
  misc_feature 1..24: note = Synthetic
  source 1..24: mol_type = other RNA
tctacgacctgtccaccaccgccc

SEQ ID NO: 15412 - RNA, 18 nt, synthetic construct
  misc_feature 1..18: note = Synthetic
  source 1..18: mol_type = other RNA
agctagacgccgccgccc

SEQ ID NO: 15413 - RNA, 19 nt, synthetic construct
  misc_feature 1..19: note = Synthetic
  source 1..19: mol_type = other RNA
gagctagacgccgccgccc

SEQ ID NO: 15414 - RNA, 21 nt, synthetic construct
  misc_feature 1..21: note = Synthetic
  source 1..21: mol_type = other RNA
gcgagctagacgccgccgccc

SEQ ID NO: 15415 - RNA, 22 nt, synthetic construct
  misc_feature 1..22: note = Synthetic
  source 1..22: mol_type = other RNA
cgcgagctagacgccgccgccc

SEQ ID NO: 15416 - RNA, 23 nt, synthetic construct
  misc_feature 1..23: note = Synthetic
  source 1..23: mol_type = other RNA
ccgcgagctagacgccgccgccc

SEQ ID NO: 15417 - RNA, 24 nt, synthetic construct
  misc_feature 1..24: note = Synthetic
  source 1..24: mol_type = other RNA
tccgcgagctagacgccgccgccc

SEQ ID NO: 15418 - RNA, 18 nt, synthetic construct
  misc_feature 1..18: note = Synthetic
  source 1..18: mol_type = other RNA
ctccccggccaagcgccc

SEQ ID NO: 15419 - RNA, 19 nt, synthetic construct
  misc_feature 1..19: note = Synthetic
  source 1..19: mol_type = other RNA
cctccccggccaagcgccc

SEQ ID NO: 15420 - RNA, 21 nt, synthetic construct
  misc_feature 1..21: note = Synthetic
  source 1..21: mol_type = other RNA
gccctccccggccaagcgccc

SEQ ID NO: 15421 - RNA, 22 nt, synthetic construct
  misc_feature 1..22: note = Synthetic
  source 1..22: mol_type = other RNA
tgccctccccggccaagcgccc

SEQ ID NO: 15422 - RNA, 23 nt, synthetic construct
  misc_feature 1..23: note = Synthetic
  source 1..23: mol_type = other RNA
ctgccctccccggccaagcgccc

SEQ ID NO: 15423 - RNA, 24 nt, synthetic construct
  misc_feature 1..24: note = Synthetic
  source 1..24: mol_type = other RNA
cctgccctccccggccaagcgccc

SEQ ID NO: 15424 - RNA, 18 nt, synthetic construct
  misc_feature 1..18: note = Synthetic
  source 1..18: mol_type = other RNA
cggccgacatgcgcgccc

SEQ ID NO: 15425 - RNA, 19 nt, synthetic construct
  misc_feature 1..19: note = Synthetic
  source 1..19: mol_type = other RNA
gcggccgacatgcgcgccc

SEQ ID NO: 15426 - RNA, 21 nt, synthetic construct
  misc_feature 1..21: note = Synthetic
  source 1..21: mol_type = other RNA
aggcggccgacatgcgcgccc

SEQ ID NO: 15427 - RNA, 22 nt, synthetic construct
  misc_feature 1..22: note = Synthetic
  source 1..22: mol_type = other RNA
gaggcggccgacatgcgcgccc

SEQ ID NO: 15428 - RNA, 23 nt, synthetic construct
  misc_feature 1..23: note = Synthetic
  source 1..23: mol_type = other RNA
ggaggcggccgacatgcgcgccc

SEQ ID NO: 15429 - RNA, 24 nt, synthetic construct
  misc_feature 1..24: note = Synthetic
  source 1..24: mol_type = other RNA
cggaggcggccgacatgcgcgccc

SEQ ID NO: 15430 - RNA, 18 nt, synthetic construct
  misc_feature 1..18: note = Synthetic
  source 1..18: mol_type = other RNA
ctggcgcgacccctgccc

SEQ ID NO: 15431 - RNA, 19 nt, synthetic construct
  misc_feature 1..19: note = Synthetic
  source 1..19: mol_type = other RNA
gctggcgcgacccctgccc

SEQ ID NO: 15432 - RNA, 21 nt, synthetic construct
  misc_feature 1..21: note = Synthetic
  source 1..21: mol_type = other RNA
tggctggcgcgacccctgccc

SEQ ID NO: 15433 - RNA, 22 nt, synthetic construct
  misc_feature 1..22: note = Synthetic
  source 1..22: mol_type = other RNA
gtggctggcgcgacccctgccc

SEQ ID NO: 15434 - RNA, 23 nt, synthetic construct
  misc_feature 1..23: note = Synthetic
  source 1..23: mol_type = other RNA
agtggctggcgcgacccctgccc

SEQ ID NO: 15435 - RNA, 24 nt, synthetic construct
  misc_feature 1..24: note = Synthetic
  source 1..24: mol_type = other RNA
gagtggctggcgcgacccctgccc

SEQ ID NO: 15436 - RNA, 18 nt, synthetic construct
  misc_feature 1..18: note = Synthetic
  source 1..18: mol_type = other RNA
atccgctcgcggattccc

SEQ ID NO: 15437 - RNA, 19 nt, synthetic construct
  misc_feature 1..19: note = Synthetic
  source 1..19: mol_type = other RNA
gatccgctcgcggattccc

SEQ ID NO: 15438 - RNA, 21 nt, synthetic construct
  misc_feature 1..21: note = Synthetic
  source 1..21: mol_type = other RNA
cagatccgctcgcggattccc

SEQ ID NO: 15439 - RNA, 22 nt, synthetic construct
  misc_feature 1..22: note = Synthetic
  source 1..22: mol_type = other RNA
gcagatccgctcgcggattccc

SEQ ID NO: 15440 - RNA, 23 nt, synthetic construct
  misc_feature 1..23: note = Synthetic
  source 1..23: mol_type = other RNA
agcagatccgctcgcggattccc

SEQ ID NO: 15441 - RNA, 24 nt, synthetic construct
  misc_feature 1..24: note = Synthetic
  source 1..24: mol_type = other RNA
aagcagatccgctcgcggattccc

SEQ ID NO: 15442 - RNA, 18 nt, synthetic construct
  misc_feature 1..18: note = Synthetic
  source 1..18: mol_type = other RNA
ggattccccagagcagcc

SEQ ID NO: 15443 - RNA, 19 nt, synthetic construct
  misc_feature 1..19: note = Synthetic
  source 1..19: mol_type = other RNA
cggattccccagagcagcc

SEQ ID NO: 15444 - RNA, 21 nt, synthetic construct
  misc_feature 1..21: note = Synthetic
  source 1..21: mol_type = other RNA
cgcggattccccagagcagcc

SEQ ID NO: 15445 - RNA, 22 nt, synthetic construct
  misc_feature 1..22: note = Synthetic
  source 1..22: mol_type = other RNA
tcgcggattccccagagcagcc

SEQ ID NO: 15446 - RNA, 23 nt, synthetic construct
  misc_feature 1..23: note = Synthetic
  source 1..23: mol_type = other RNA
ctcgcggattccccagagcagcc

SEQ ID NO: 15447 - RNA, 24 nt, synthetic construct
  misc_feature 1..24: note = Synthetic
  source 1..24: mol_type = other RNA
gctcgcggattccccagagcagcc

SEQ ID NO: 15448 - RNA, 18 nt, synthetic construct
  misc_feature 1..18: note = Synthetic
  source 1..18: mol_type = other RNA
aagcgtccggccgcagcc

SEQ ID NO: 15449 - RNA, 19 nt, synthetic construct
  misc_feature 1..19: note = Synthetic
  source 1..19: mol_type = other RNA
caagcgtccggccgcagcc

SEQ ID NO: 15450 - RNA, 21 nt, synthetic construct
  misc_feature 1..21: note = Synthetic
  source 1..21: mol_type = other RNA
cccaagcgtccggccgcagcc

SEQ ID NO: 15451 - RNA, 22 nt, synthetic construct
  misc_feature 1..22: note = Synthetic
  source 1..22: mol_type = other RNA
gcccaagcgtccggccgcagcc

SEQ ID NO: 15452 - RNA, 23 nt, synthetic construct
  misc_feature 1..23: note = Synthetic
  source 1..23: mol_type = other RNA
cgcccaagcgtccggccgcagcc

SEQ ID NO: 15453 - RNA, 24 nt, synthetic construct
  misc_feature 1..24: note = Synthetic
  source 1..24: mol_type = other RNA
gcgcccaagcgtccggccgcagcc

SEQ ID NO: 15454 - RNA, 18 nt, synthetic construct
  misc_feature 1..18: note = Synthetic
  source 1..18: mol_type = other RNA
gacctgtccaccaccgcc

SEQ ID NO: 15455 - RNA, 19 nt, synthetic construct
  misc_feature 1..19: note = Synthetic
  source 1..19: mol_type = other RNA
cgacctgtccaccaccgcc

SEQ ID NO: 15456 - RNA, 21 nt, synthetic construct
  misc_feature 1..21: note = Synthetic
  source 1..21: mol_type = other RNA
tacgacctgtccaccaccgcc

SEQ ID NO: 15457 - RNA, 22 nt, synthetic construct
  misc_feature 1..22: note = Synthetic
  source 1..22: mol_type = other RNA
ctacgacctgtccaccaccgcc

SEQ ID NO: 15458 - RNA, 23 nt, synthetic construct
  misc_feature 1..23: note = Synthetic
  source 1..23: mol_type = other RNA
tctacgacctgtccaccaccgcc

SEQ ID NO: 15459 - RNA, 24 nt, synthetic construct
  misc_feature 1..24: note = Synthetic
  source 1..24: mol_type = other RNA
ctctacgacctgtccaccaccgcc

SEQ ID NO: 15460 - RNA, 18 nt, synthetic construct
  misc_feature 1..18: note = Synthetic
  source 1..18: mol_type = other RNA
gggcgatttaggggcgcc

SEQ ID NO: 15461 - RNA, 19 nt, synthetic construct
  misc_feature 1..19: note = Synthetic
  source 1..19: mol_type = other RNA
ggggcgatttaggggcgcc

SEQ ID NO: 15462 - RNA, 21 nt, synthetic construct
  misc_feature 1..21: note = Synthetic
  source 1..21: mol_type = other RNA
caggggcgatttaggggcgcc

SEQ ID NO: 15463 - RNA, 22 nt, synthetic construct
  misc_feature 1..22: note = Synthetic
  source 1..22: mol_type = other RNA
ccaggggcgatttaggggcgcc

SEQ ID NO: 15464 - RNA, 23 nt, synthetic construct
  misc_feature 1..23: note = Synthetic
  source 1..23: mol_type = other RNA
cccaggggcgatttaggggcgcc

SEQ ID NO: 15465 - RNA, 24 nt, synthetic construct
  misc_feature 1..24: note = Synthetic
  source 1..24: mol_type = other RNA
acccaggggcgatttaggggcgcc

SEQ ID NO: 15466 - RNA, 18 nt, synthetic construct
  misc_feature 1..18: note = Synthetic
  source 1..18: mol_type = other RNA
aagctgctgctgatcgcc

SEQ ID NO: 15467 - RNA, 19 nt, synthetic construct
  misc_feature 1..19: note = Synthetic
  source 1..19: mol_type = other RNA
caagctgctgctgatcgcc

SEQ ID NO: 15468 - RNA, 21 nt, synthetic construct
  misc_feature 1..21: note = Synthetic
  source 1..21: mol_type = other RNA
accaagctgctgctgatcgcc

SEQ ID NO: 15469 - RNA, 22 nt, synthetic construct
  misc_feature 1..22: note = Synthetic
  source 1..22: mol_type = other RNA
caccaagctgctgctgatcgcc

SEQ ID NO: 15470 - RNA, 23 nt, synthetic construct
  misc_feature 1..23: note = Synthetic
  source 1..23: mol_type = other RNA
tcaccaagctgctgctgatcgcc

SEQ ID NO: 15471 - RNA, 24 nt, synthetic construct
  misc_feature 1..24: note = Synthetic
  source 1..24: mol_type = other RNA
ttcaccaagctgctgctgatcgcc

SEQ ID NO: 15472 - RNA, 18 nt, synthetic construct
  misc_feature 1..18: note = Synthetic
  source 1..18: mol_type = other RNA
attgcccacggcgtcgcc

SEQ ID NO: 15473 - RNA, 19 nt, synthetic construct
  misc_feature 1..19: note = Synthetic
  source 1..19: mol_type = other RNA
cattgcccacggcgtcgcc

SEQ ID NO: 15474 - RNA, 21 nt, synthetic construct
  misc_feature 1..21: note = Synthetic
  source 1..21: mol_type = other RNA
gccattgcccacggcgtcgcc

SEQ ID NO: 15475 - RNA, 22 nt, synthetic construct
  misc_feature 1..22: note = Synthetic
  source 1..22: mol_type = other RNA
cgccattgcccacggcgtcgcc

SEQ ID NO: 15476 - RNA, 23 nt, synthetic construct
  misc_feature 1..23: note = Synthetic
  source 1..23: mol_type = other RNA
acgccattgcccacggcgtcgcc

SEQ ID NO: 15477 - RNA, 24 nt, synthetic construct
  misc_feature 1..24: note = Synthetic
  source 1..24: mol_type = other RNA
tacgccattgcccacggcgtcgcc

SEQ ID NO: 15478 - RNA, 18 nt, synthetic construct
  misc_feature 1..18: note = Synthetic
  source 1..18: mol_type = other RNA
gccgccgggctgacggcc

SEQ ID NO: 15479 - RNA, 19 nt, synthetic construct
  misc_feature 1..19: note = Synthetic
  source 1..19: mol_type = other RNA
ggccgccgggctgacggcc

SEQ ID NO: 15480 - RNA, 21 nt, synthetic construct
  misc_feature 1..21: note = Synthetic
  source 1..21: mol_type = other RNA
acggccgccgggctgacggcc

SEQ ID NO: 15481 - RNA, 22 nt, synthetic construct
  misc_feature 1..22: note = Synthetic
  source 1..22: mol_type = other RNA
cacggccgccgggctgacggcc

SEQ ID NO: 15482 - RNA, 23 nt, synthetic construct
  misc_feature 1..23: note = Synthetic
  source 1..23: mol_type = other RNA
tcacggccgccgggctgacggcc

SEQ ID NO: 15483 - RNA, 24 nt, synthetic construct
  misc_feature 1..24: note = Synthetic
  source 1..24: mol_type = other RNA
ctcacggccgccgggctgacggcc

SEQ ID NO: 15484 - RNA, 18 nt, synthetic construct
  misc_feature 1..18: note = Synthetic
  source 1..18: mol_type = other RNA
ctgaacgagctggcggcc

SEQ ID NO: 15485 - RNA, 19 nt, synthetic construct
  misc_feature 1..19: note = Synthetic
  source 1..19: mol_type = other RNA
cctgaacgagctggcggcc

SEQ ID NO: 15486 - RNA, 21 nt, synthetic construct
  misc_feature 1..21: note = Synthetic
  source 1..21: mol_type = other RNA
cacctgaacgagctggcggcc

SEQ ID NO: 15487 - RNA, 22 nt, synthetic construct
  misc_feature 1..22: note = Synthetic
  source 1..22: mol_type = other RNA
ccacctgaacgagctggcggcc

SEQ ID NO: 15488 - RNA, 23 nt, synthetic construct
  misc_feature 1..23: note = Synthetic
  source 1..23: mol_type = other RNA
cccacctgaacgagctggcggcc

SEQ ID NO: 15489 - RNA, 24 nt, synthetic construct
  misc_feature 1..24: note = Synthetic
  source 1..24: mol_type = other RNA
tcccacctgaacgagctggcggcc

SEQ ID NO: 15490 - RNA, 18 nt, synthetic construct
  misc_feature 1..18: note = Synthetic
  source 1..18: mol_type = other RNA
cggtgacgaccatcggcc

SEQ ID NO: 15491 - RNA, 19 nt, synthetic construct
  misc_feature 1..19: note = Synthetic
  source 1..19: mol_type = other RNA
acggtgacgaccatcggcc

SEQ ID NO: 15492 - RNA, 21 nt, synthetic construct
  misc_feature 1..21: note = Synthetic
  source 1..21: mol_type = other RNA
cgacggtgacgaccatcggcc

SEQ ID NO: 15493 - RNA, 22 nt, synthetic construct
  misc_feature 1..22: note = Synthetic
  source 1..22: mol_type = other RNA
gcgacggtgacgaccatcggcc

SEQ ID NO: 15494 - RNA, 23 nt, synthetic construct
  misc_feature 1..23: note = Synthetic
  source 1..23: mol_type = other RNA
cgcgacggtgacgaccatcggcc

SEQ ID NO: 15495 - RNA, 24 nt, synthetic construct
  misc_feature 1..24: note = Synthetic
  source 1..24: mol_type = other RNA
ccgcgacggtgacgaccatcggcc

SEQ ID NO: 15496 - RNA, 18 nt, synthetic construct
  misc_feature 1..18: note = Synthetic
  source 1..18: mol_type = other RNA
cgcggctggccgccctcc

SEQ ID NO: 15497 - RNA, 19 nt, synthetic construct
  misc_feature 1..19: note = Synthetic
  source 1..19: mol_type = other RNA
gcgcggctggccgccctcc

SEQ ID NO: 15498 - RNA, 21 nt, synthetic construct
  misc_feature 1..21: note = Synthetic
  source 1..21: mol_type = other RNA
tcgcgcggctggccgccctcc

SEQ ID NO: 15499 - RNA, 22 nt, synthetic construct
  misc_feature 1..22: note = Synthetic
  source 1..22: mol_type = other RNA
gtcgcgcggctggccgccctcc

SEQ ID NO: 15500 - RNA, 23 nt, synthetic construct
  misc_feature 1..23: note = Synthetic
  source 1..23: mol_type = other RNA
ggtcgcgcggctggccgccctcc

SEQ ID NO: 15501 - RNA, 24 nt, synthetic construct
  misc_feature 1..24: note = Synthetic
  source 1..24: mol_type = other RNA
cggtcgcgcggctggccgccctcc

SEQ ID NO: 15502 - RNA, 18 nt, synthetic construct
  misc_feature 1..18: note = Synthetic
  source 1..18: mol_type = other RNA
tcgttccgcggcatctcc

SEQ ID NO: 15503 - RNA, 19 nt, synthetic construct
  misc_feature 1..19: note = Synthetic
  source 1..19: mol_type = other RNA
gtcgttccgcggcatctcc

SEQ ID NO: 15504 - RNA, 21 nt, synthetic construct
  misc_feature 1..21: note = Synthetic
  source 1..21: mol_type = other RNA
gcgtcgttccgcggcatctcc

SEQ ID NO: 15505 - RNA, 22 nt, synthetic construct
  misc_feature 1..22: note = Synthetic
  source 1..22: mol_type = other RNA
cgcgtcgttccgcggcatctcc

SEQ ID NO: 15506 - RNA, 23 nt, synthetic construct
  misc_feature 1..23: note = Synthetic
  source 1..23: mol_type = other RNA
gcgcgtcgttccgcggcatctcc

SEQ ID NO: 15507 - RNA, 24 nt, synthetic construct
  misc_feature 1..24: note = Synthetic
  source 1..24: mol_type = other RNA
ggcgcgtcgttccgcggcatctcc

SEQ ID NO: 15508 - RNA, 18 nt, synthetic construct
  misc_feature 1..18: note = Synthetic
  source 1..18: mol_type = other RNA
tgcttcagcacgctctcc

SEQ ID NO: 15509 - RNA, 19 nt, synthetic construct
  misc_feature 1..19: note = Synthetic
  source 1..19: mol_type = other RNA
gtgcttcagcacgctctcc

SEQ ID NO: 15510 - RNA, 21 nt, synthetic construct
  misc_feature 1..21: note = Synthetic
  source 1..21: mol_type = other RNA
ctgtgcttcagcacgctctcc

SEQ ID NO: 15511 - RNA, 22 nt, synthetic construct
  misc_feature 1..22: note = Synthetic
  source 1..22: mol_type = other RNA
cctgtgcttcagcacgctctcc

SEQ ID NO: 15512 - RNA, 23 nt, synthetic construct
  misc_feature 1..23: note = Synthetic
  source 1..23: mol_type = other RNA
acctgtgcttcagcacgctctcc

SEQ ID NO: 15513 - RNA, 24 nt, synthetic construct
  misc_feature 1..24: note = Synthetic
  source 1..24: mol_type = other RNA
aacctgtgcttcagcacgctctcc

SEQ ID NO: 15514 - RNA, 18 nt, synthetic construct
  misc_feature 1..18: note = Synthetic
  source 1..18: mol_type = other RNA
gcggccctgcgcgagtcc

SEQ ID NO: 15515 - RNA, 19 nt, synthetic construct
  misc_feature 1..19: note = Synthetic
  source 1..19: mol_type = other RNA
cgcggccctgcgcgagtcc

SEQ ID NO: 15516 - RNA, 21 nt, synthetic construct
  misc_feature 1..21: note = Synthetic
  source 1..21: mol_type = other RNA
gccgcggccctgcgcgagtcc

SEQ ID NO: 15517 - RNA, 22 nt, synthetic construct
  misc_feature 1..22: note = Synthetic
  source 1..22: mol_type = other RNA
ggccgcggccctgcgcgagtcc

SEQ ID NO: 15518 - RNA, 23 nt, synthetic construct
  misc_feature 1..23: note = Synthetic
  source 1..23: mol_type = other RNA
tggccgcggccctgcgcgagtcc

SEQ ID NO: 15519 - RNA, 24 nt, synthetic construct
  misc_feature 1..24: note = Synthetic
  source 1..24: mol_type = other RNA
atggccgcggccctgcgcgagtcc

SEQ ID NO: 15520 - RNA, 18 nt, synthetic construct
  misc_feature 1..18: note = Synthetic
  source 1..18: mol_type = other RNA
agctcctggccgatttcc

SEQ ID NO: 15521 - RNA, 19 nt, synthetic construct
  misc_feature 1..19: note = Synthetic
  source 1..19: mol_type = other RNA
cagctcctggccgatttcc

SEQ ID NO: 15522 - RNA, 21 nt, synthetic construct
  misc_feature 1..21: note = Synthetic
  source 1..21: mol_type = other RNA
aacagctcctggccgatttcc

SEQ ID NO: 15523 - RNA, 22 nt, synthetic construct
  misc_feature 1..22: note = Synthetic
  source 1..22: mol_type = other RNA
gaacagctcctggccgatttcc

SEQ ID NO: 15524 - RNA, 23 nt, synthetic construct
  misc_feature 1..23: note = Synthetic
  source 1..23: mol_type = other RNA
cgaacagctcctggccgatttcc

SEQ ID NO: 15525 - RNA, 24 nt, synthetic construct
  misc_feature 1..24: note = Synthetic
  source 1..24: mol_type = other RNA
tcgaacagctcctggccgatttcc

SEQ ID NO: 15526 - RNA, 18 nt, synthetic construct
  misc_feature 1..18: note = Synthetic
  source 1..18: mol_type = other RNA
caagcgtccggccgcagc

SEQ ID NO: 15527 - RNA, 19 nt, synthetic construct
  misc_feature 1..19: note = Synthetic
  source 1..19: mol_type = other RNA
ccaagcgtccggccgcagc

SEQ ID NO: 15528 - RNA, 21 nt, synthetic construct
  misc_feature 1..21: note = Synthetic
  source 1..21: mol_type = other RNA
gcccaagcgtccggccgcagc

SEQ ID NO: 15529 - RNA, 22 nt, synthetic construct
  misc_feature 1..22: note = Synthetic
  source 1..22: mol_type = other RNA
cgcccaagcgtccggccgcagc

SEQ ID NO: 15530 - RNA, 23 nt, synthetic construct
  misc_feature 1..23: note = Synthetic
  source 1..23: mol_type = other RNA
gcgcccaagcgtccggccgcagc

SEQ ID NO: 15531 - RNA, 24 nt, synthetic construct
  misc_feature 1..24: note = Synthetic
  source 1..24: mol_type = other RNA
ggcgcccaagcgtccggccgcagc

SEQ ID NO: 15532 - RNA, 18 nt, synthetic construct
  misc_feature 1..18: note = Synthetic
  source 1..18: mol_type = other RNA
ggttcacgggagtgcagc

SEQ ID NO: 15533 - RNA, 19 nt, synthetic construct
  misc_feature 1..19: note = Synthetic
  source 1..19: mol_type = other RNA
gggttcacgggagtgcagc

SEQ ID NO: 15534 - RNA, 21 nt, synthetic construct
  misc_feature 1..21: note = Synthetic
  source 1..21: mol_type = other RNA
acgggttcacgggagtgcagc

SEQ ID NO: 15535 - RNA, 22 nt, synthetic construct
  misc_feature 1..22: note = Synthetic
  source 1..22: mol_type = other RNA
tacgggttcacgggagtgcagc

SEQ ID NO: 15536 - RNA, 23 nt, synthetic construct
  misc_feature 1..23: note = Synthetic
  source 1..23: mol_type = other RNA
gtacgggttcacgggagtgcagc

SEQ ID NO: 15537 - RNA, 24 nt, synthetic construct
  misc_feature 1..24: note = Synthetic
  source 1..24: mol_type = other RNA
tgtacgggttcacgggagtgcagc

SEQ ID NO: 15538 - RNA, 18 nt, synthetic construct
  misc_feature 1..18: note = Synthetic
  source 1..18: mol_type = other RNA
aggagggcgggggcgagc

SEQ ID NO: 15539 - RNA, 19 nt, synthetic construct
  misc_feature 1..19: note = Synthetic
  source 1..19: mol_type = other RNA
gaggagggcgggggcgagc

SEQ ID NO: 15540 - RNA, 21 nt, synthetic construct
  misc_feature 1..21: note = Synthetic
  source 1..21: mol_type = other RNA
gcgaggagggcgggggcgagc

SEQ ID NO: 15541 - RNA, 22 nt, synthetic construct
  misc_feature 1..22: note = Synthetic
  source 1..22: mol_type = other RNA
cgcgaggagggcgggggcgagc

SEQ ID NO: 15542 - RNA, 23 nt, synthetic construct
  misc_feature 1..23: note = Synthetic
  source 1..23: mol_type = other RNA
acgcgaggagggcgggggcgagc

SEQ ID NO: 15543 - RNA, 24 nt, synthetic construct
  misc_feature 1..24: note = Synthetic
  source 1..24: mol_type = other RNA
aacgcgaggagggcgggggcgagc

SEQ ID NO: 15544 - RNA, 18 nt, synthetic construct
  misc_feature 1..18: note = Synthetic
  source 1..18: mol_type = other RNA
gcgggggcgagcgggagc

SEQ ID NO: 15545 - RNA, 19 nt, synthetic construct
  misc_feature 1..19: note = Synthetic
  source 1..19: mol_type = other RNA
ggcgggggcgagcgggagc

SEQ ID NO: 15546 - RNA, 21 nt, synthetic construct
  misc_feature 1..21: note = Synthetic
  source 1..21: mol_type = other RNA
agggcgggggcgagcgggagc

SEQ ID NO: 15547 - RNA, 22 nt, synthetic construct
  misc_feature 1..22: note = Synthetic
  source 1..22: mol_type = other RNA
gagggcgggggcgagcgggagc

SEQ ID NO: 15548 - RNA, 23 nt, synthetic construct
  misc_feature 1..23: note = Synthetic
  source 1..23: mol_type = other RNA
ggagggcgggggcgagcgggagc

SEQ ID NO: 15549 - RNA, 24 nt, synthetic construct
  misc_feature 1..24: note = Synthetic
  source 1..24: mol_type = other RNA
aggagggcgggggcgagcgggagc

SEQ ID NO: 15550 - RNA, 18 nt, synthetic construct
  misc_feature 1..18: note = Synthetic
  source 1..18: mol_type = other RNA
gaggacgaggacgaacgc

SEQ ID NO: 15551 - RNA, 19 nt, synthetic construct
  misc_feature 1..19: note = Synthetic
  source 1..19: mol_type = other RNA
ggaggacgaggacgaacgc

SEQ ID NO: 15552 - RNA, 21 nt, synthetic construct
  misc_feature 1..21: note = Synthetic
  source 1..21: mol_type = other RNA
ggggaggacgaggacgaacgc

SEQ ID NO: 15553 - RNA, 22 nt, synthetic construct
  misc_feature 1..22: note = Synthetic
  source 1..22: mol_type = other RNA
gggggaggacgaggacgaacgc

SEQ ID NO: 15554 - RNA, 23 nt, synthetic construct
  misc_feature 1..23: note = Synthetic
  source 1..23: mol_type = other RNA
agggggaggacgaggacgaacgc

SEQ ID NO: 15555 - RNA, 24 nt, synthetic construct
  misc_feature 1..24: note = Synthetic
  source 1..24: mol_type = other RNA
gagggggaggacgaggacgaacgc

SEQ ID NO: 15556 - RNA, 18 nt, synthetic construct
  misc_feature 1..18: note = Synthetic
  source 1..18: mol_type = other RNA
ctggacgggtacggccgc

SEQ ID NO: 15557 - RNA, 19 nt, synthetic construct
  misc_feature 1..19: note = Synthetic
  source 1..19: mol_type = other RNA
cctggacgggtacggccgc

SEQ ID NO: 15558 - RNA, 21 nt, synthetic construct
  misc_feature 1..21: note = Synthetic
  source 1..21: mol_type = other RNA
cccctggacgggtacggccgc

SEQ ID NO: 15559 - RNA, 22 nt, synthetic construct
  misc_feature 1..22: note = Synthetic
  source 1..22: mol_type = other RNA
ccccctggacgggtacggccgc

SEQ ID NO: 15560 - RNA, 23 nt, synthetic construct
  misc_feature 1..23: note = Synthetic
  source 1..23: mol_type = other RNA
tccccctggacgggtacggccgc

SEQ ID NO: 15561 - RNA, 24 nt, synthetic construct
  misc_feature 1..24: note = Synthetic
  source 1..24: mol_type = other RNA
gtccccctggacgggtacggccgc

SEQ ID NO: 15562 - RNA, 18 nt, synthetic construct
  misc_feature 1..18: note = Synthetic
  source 1..18: mol_type = other RNA
gggagccggagggcgcgc

SEQ ID NO: 15563 - RNA, 19 nt, synthetic construct
  misc_feature 1..19: note = Synthetic
  source 1..19: mol_type = other RNA
cgggagccggagggcgcgc

SEQ ID NO: 15564 - RNA, 21 nt, synthetic construct
  misc_feature 1..21: note = Synthetic
  source 1..21: mol_type = other RNA
agcgggagccggagggcgcgc

SEQ ID NO: 15565 - RNA, 22 nt, synthetic construct
  misc_feature 1..22: note = Synthetic
  source 1..22: mol_type = other RNA
gagcgggagccggagggcgcgc

SEQ ID NO: 15566 - RNA, 23 nt, synthetic construct
  misc_feature 1..23: note = Synthetic
  source 1..23: mol_type = other RNA
cgagcgggagccggagggcgcgc

SEQ ID NO: 15567 - RNA, 24 nt, synthetic construct
  misc_feature 1..24: note = Synthetic
  source 1..24: mol_type = other RNA
gcgagcgggagccggagggcgcgc

SEQ ID NO: 15568 - RNA, 18 nt, synthetic construct
  misc_feature 1..18: note = Synthetic
  source 1..18: mol_type = other RNA
gcgggagccggagggcgc

SEQ ID NO: 15569 - RNA, 19 nt, synthetic construct
  misc_feature 1..19: note = Synthetic
  source 1..19: mol_type = other RNA
agcgggagccggagggcgc

SEQ ID NO: 15570 - RNA, 21 nt, synthetic construct
  misc_feature 1..21: note = Synthetic
  source 1..21: mol_type = other RNA
cgagcgggagccggagggcgc

SEQ ID NO: 15571 - RNA, 22 nt, synthetic construct
  misc_feature 1..22: note = Synthetic
  source 1..22: mol_type = other RNA
gcgagcgggagccggagggcgc

SEQ ID NO: 15572 - RNA, 23 nt, synthetic construct
  misc_feature 1..23: note = Synthetic
  source 1..23: mol_type = other RNA
ggcgagcgggagccggagggcgc

SEQ ID NO: 15573 - RNA, 24 nt, synthetic construct
  misc_feature 1..24: note = Synthetic
  source 1..24: mol_type = other RNA
gggcgagcgggagccggagggcgc

SEQ ID NO: 15574 - RNA, 18 nt, synthetic construct
  misc_feature 1..18: note = Synthetic
  source 1..18: mol_type = other RNA
ggggcgatttaggggcgc

SEQ ID NO: 15575 - RNA, 19 nt, synthetic construct
  misc_feature 1..19: note = Synthetic
  source 1..19: mol_type = other RNA
aggggcgatttaggggcgc

SEQ ID NO: 15576 - RNA, 21 nt, synthetic construct
  misc_feature 1..21: note = Synthetic
  source 1..21: mol_type = other RNA
ccaggggcgatttaggggcgc

SEQ ID NO: 15577 - RNA, 22 nt, synthetic construct
  misc_feature 1..22: note = Synthetic
  source 1..22: mol_type = other RNA
cccaggggcgatttaggggcgc

SEQ ID NO: 15578 - RNA, 23 nt, synthetic construct
  misc_feature 1..23: note = Synthetic
  source 1..23: mol_type = other RNA
acccaggggcgatttaggggcgc

SEQ ID NO: 15579 - RNA, 24 nt, synthetic construct
  misc_feature 1..24: note = Synthetic
  source 1..24: mol_type = other RNA
cacccaggggcgatttaggggcgc

SEQ ID NO: 15580 - RNA, 18 nt, synthetic construct
  misc_feature 1..18: note = Synthetic
  source 1..18: mol_type = other RNA
cgatatcgaatgcaaggc

SEQ ID NO: 15581 - RNA, 19 nt, synthetic construct
  misc_feature 1..19: note = Synthetic
  source 1..19: mol_type = other RNA
tcgatatcgaatgcaaggc

SEQ ID NO: 15582 - RNA, 21 nt, synthetic construct
  misc_feature 1..21: note = Synthetic
  source 1..21: mol_type = other RNA
cttcgatatcgaatgcaaggc

SEQ ID NO: 15583 - RNA, 22 nt, synthetic construct
  misc_feature 1..22: note = Synthetic
  source 1..22: mol_type = other RNA
gcttcgatatcgaatgcaaggc

SEQ ID NO: 15584 - RNA, 23 nt, synthetic construct
  misc_feature 1..23: note = Synthetic
  source 1..23: mol_type = other RNA
tgcttcgatatcgaatgcaaggc

SEQ ID NO: 15585 - RNA, 24 nt, synthetic construct
  misc_feature 1..24: note = Synthetic
  source 1..24: mol_type = other RNA
gtgcttcgatatcgaatgcaaggc

SEQ ID NO: 15586 - RNA, 18 nt, synthetic construct
  misc_feature 1..18: note = Synthetic
  source 1..18: mol_type = other RNA
cgcgtgtgggacataggc

SEQ ID NO: 15587 - RNA, 19 nt, synthetic construct
  misc_feature 1..19: note = Synthetic
  source 1..19: mol_type = other RNA
tcgcgtgtgggacataggc

SEQ ID NO: 15588 - RNA, 21 nt, synthetic construct
  misc_feature 1..21: note = Synthetic
  source 1..21: mol_type = other RNA
tttcgcgtgtgggacataggc

SEQ ID NO: 15589 - RNA, 22 nt, synthetic construct
  misc_feature 1..22: note = Synthetic
  source 1..22: mol_type = other RNA
gtttcgcgtgtgggacataggc

SEQ ID NO: 15590 - RNA, 23 nt, synthetic construct
  misc_feature 1..23: note = Synthetic
  source 1..23: mol_type = other RNA
tgtttcgcgtgtgggacataggc

SEQ ID NO: 15591 - RNA, 24 nt, synthetic construct
  misc_feature 1..24: note = Synthetic
  source 1..24: mol_type = other RNA
gtgtttcgcgtgtgggacataggc

SEQ ID NO: 15592 - RNA, 18 nt, synthetic construct
  misc_feature 1..18: note = Synthetic
  source 1..18: mol_type = other RNA
tacggccgcatgaacggc

SEQ ID NO: 15593 - RNA, 19 nt, synthetic construct
  misc_feature 1..19: note = Synthetic
  source 1..19: mol_type = other RNA
gtacggccgcatgaacggc

SEQ ID NO: 15594 - RNA, 21 nt, synthetic construct
  misc_feature 1..21: note = Synthetic
  source 1..21: mol_type = other RNA
gggtacggccgcatgaacggc

SEQ ID NO: 15595 - RNA, 22 nt, synthetic construct
  misc_feature 1..22: note = Synthetic
  source 1..22: mol_type = other RNA
cgggtacggccgcatgaacggc

SEQ ID NO: 15596 - RNA, 23 nt, synthetic construct
  misc_feature 1..23: note = Synthetic
  source 1..23: mol_type = other RNA
acgggtacggccgcatgaacggc

SEQ ID NO: 15597 - RNA, 24 nt, synthetic construct
  misc_feature 1..24: note = Synthetic
  source 1..24: mol_type = other RNA
gacgggtacggccgcatgaacggc

SEQ ID NO: 15598 - RNA, 18 nt, synthetic construct
  misc_feature 1..18: note = Synthetic
  source 1..18: mol_type = other RNA
gggaggacgaggagcggc

SEQ ID NO: 15599 - RNA, 19 nt, synthetic construct
  misc_feature 1..19: note = Synthetic
  source 1..19: mol_type = other RNA
cgggaggacgaggagcggc

SEQ ID NO: 15600 - RNA, 21 nt, synthetic construct
  misc_feature 1..21: note = Synthetic
  source 1..21: mol_type = other RNA
cccgggaggacgaggagcggc

SEQ ID NO: 15601 - RNA, 22 nt, synthetic construct
  misc_feature 1..22: note = Synthetic
  source 1..22: mol_type = other RNA
gcccgggaggacgaggagcggc

SEQ ID NO: 15602 - RNA, 23 nt, synthetic construct
  misc_feature 1..23: note = Synthetic
  source 1..23: mol_type = other RNA
agcccgggaggacgaggagcggc

SEQ ID NO: 15603 - RNA, 24 nt, synthetic construct
  misc_feature 1..24: note = Synthetic
  source 1..24: mol_type = other RNA
cagcccgggaggacgaggagcggc

SEQ ID NO: 15604 - RNA, 18 nt, synthetic construct
  misc_feature 1..18: note = Synthetic
  source 1..18: mol_type = other RNA
cctgaacgagctggcggc

SEQ ID NO: 15605 - RNA, 19 nt, synthetic construct
  misc_feature 1..19: note = Synthetic
  source 1..19: mol_type = other RNA
acctgaacgagctggcggc

SEQ ID NO: 15606 - RNA, 21 nt, synthetic construct
  misc_feature 1..21: note = Synthetic
  source 1..21: mol_type = other RNA
ccacctgaacgagctggcggc

SEQ ID NO: 15607 - RNA, 22 nt, synthetic construct
  misc_feature 1..22: note = Synthetic
  source 1..22: mol_type = other RNA
cccacctgaacgagctggcggc

SEQ ID NO: 15608 - RNA, 23 nt, synthetic construct
  misc_feature 1..23: note = Synthetic
  source 1..23: mol_type = other RNA
tcccacctgaacgagctggcggc

SEQ ID NO: 15609 - RNA, 24 nt, synthetic construct
  misc_feature 1..24: note = Synthetic
  source 1..24: mol_type = other RNA
atcccacctgaacgagctggcggc

SEQ ID NO: 15610 - RNA, 18 nt, synthetic construct
  misc_feature 1..18: note = Synthetic
  source 1..18: mol_type = other RNA
gacgaacgcgaggagggc

SEQ ID NO: 15611 - RNA, 19 nt, synthetic construct
  misc_feature 1..19: note = Synthetic
  source 1..19: mol_type = other RNA
ggacgaacgcgaggagggc

SEQ ID NO: 15612 - RNA, 21 nt, synthetic construct
  misc_feature 1..21: note = Synthetic
  source 1..21: mol_type = other RNA
gaggacgaacgcgaggagggc

SEQ ID NO: 15613 - RNA, 22 nt, synthetic construct
  misc_feature 1..22: note = Synthetic
  source 1..22: mol_type = other RNA
cgaggacgaacgcgaggagggc

SEQ ID NO: 15614 - RNA, 23 nt, synthetic construct
  misc_feature 1..23: note = Synthetic
  source 1..23: mol_type = other RNA
acgaggacgaacgcgaggagggc

SEQ ID NO: 15615 - RNA, 24 nt, synthetic construct
  misc_feature 1..24: note = Synthetic
  source 1..24: mol_type = other RNA
gacgaggacgaacgcgaggagggc

SEQ ID NO: 15616 - RNA, 18 nt, synthetic construct
  misc_feature 1..18: note = Synthetic
  source 1..18: mol_type = other RNA
taccgtctcaaaccgggc

SEQ ID NO: 15617 - RNA, 19 nt, synthetic construct
  misc_feature 1..19: note = Synthetic
  source 1..19: mol_type = other RNA
gtaccgtctcaaaccgggc

SEQ ID NO: 15618 - RNA, 21 nt, synthetic construct
  misc_feature 1..21: note = Synthetic
  source 1..21: mol_type = other RNA
tggtaccgtctcaaaccgggc

SEQ ID NO: 15619 - RNA, 22 nt, synthetic construct
  misc_feature 1..22: note = Synthetic
  source 1..22: mol_type = other RNA
ctggtaccgtctcaaaccgggc

SEQ ID NO: 15620 - RNA, 23 nt, synthetic construct
  misc_feature 1..23: note = Synthetic
  source 1..23: mol_type = other RNA
gctggtaccgtctcaaaccgggc

SEQ ID NO: 15621 - RNA, 24 nt, synthetic construct
  misc_feature 1..24: note = Synthetic
  source 1..24: mol_type = other RNA
ggctggtaccgtctcaaaccgggc

SEQ ID NO: 15622 - RNA, 18 nt, synthetic construct
  misc_feature 1..18: note = Synthetic
  source 1..18: mol_type = other RNA
gcgcacctggaggcgggc

SEQ ID NO: 15623 - RNA, 19 nt, synthetic construct
  misc_feature 1..19: note = Synthetic
  source 1..19: mol_type = other RNA
ggcgcacctggaggcgggc

SEQ ID NO: 15624 - RNA, 21 nt, synthetic construct
  misc_feature 1..21: note = Synthetic
  source 1..21: mol_type = other RNA
gtggcgcacctggaggcgggc

SEQ ID NO: 15625 - RNA, 22 nt, synthetic construct
  misc_feature 1..22: note = Synthetic
  source 1..22: mol_type = other RNA
agtggcgcacctggaggcgggc

SEQ ID NO: 15626 - RNA, 23 nt, synthetic construct
  misc_feature 1..23: note = Synthetic
  source 1..23: mol_type = other RNA
cagtggcgcacctggaggcgggc

SEQ ID NO: 15627 - RNA, 24 nt, synthetic construct
  misc_feature 1..24: note = Synthetic
  source 1..24: mol_type = other RNA
gcagtggcgcacctggaggcgggc

SEQ ID NO: 15628 - RNA, 18 nt, synthetic construct
  misc_feature 1..18: note = Synthetic
  source 1..18: mol_type = other RNA
ctggccatcgaggggggc

SEQ ID NO: 15629 - RNA, 19 nt, synthetic construct
  misc_feature 1..19: note = Synthetic
  source 1..19: mol_type = other RNA
cctggccatcgaggggggc

SEQ ID NO: 15630 - RNA, 21 nt, synthetic construct
  misc_feature 1..21: note = Synthetic
  source 1..21: mol_type = other RNA
aacctggccatcgaggggggc

SEQ ID NO: 15631 - RNA, 22 nt, synthetic construct
  misc_feature 1..22: note = Synthetic
  source 1..22: mol_type = other RNA
caacctggccatcgaggggggc

SEQ ID NO: 15632 - RNA, 23 nt, synthetic construct
  misc_feature 1..23: note = Synthetic
  source 1..23: mol_type = other RNA
acaacctggccatcgaggggggc

SEQ ID NO: 15633 - RNA, 24 nt, synthetic construct
  misc_feature 1..24: note = Synthetic
  source 1..24: mol_type = other RNA
gacaacctggccatcgaggggggc

SEQ ID NO: 15634 - RNA, 18 nt, synthetic construct
  misc_feature 1..18: note = Synthetic
  source 1..18: mol_type = other RNA
ggctggcgcgacccctgc

SEQ ID NO: 15635 - RNA, 19 nt, synthetic construct
  misc_feature 1..19: note = Synthetic
  source 1..19: mol_type = other RNA
tggctggcgcgacccctgc

SEQ ID NO: 15636 - RNA, 21 nt, synthetic construct
  misc_feature 1..21: note = Synthetic
  source 1..21: mol_type = other RNA
agtggctggcgcgacccctgc

SEQ ID NO: 15637 - RNA, 22 nt, synthetic construct
  misc_feature 1..22: note = Synthetic
  source 1..22: mol_type = other RNA
gagtggctggcgcgacccctgc

SEQ ID NO: 15638 - RNA, 23 nt, synthetic construct
  misc_feature 1..23: note = Synthetic
  source 1..23: mol_type = other RNA
ggagtggctggcgcgacccctgc

SEQ ID NO: 15639 - RNA, 24 nt, synthetic construct
  misc_feature 1..24: note = Synthetic
  source 1..24: mol_type = other RNA
aggagtggctggcgcgacccctgc

SEQ ID NO: 15640 - RNA, 18 nt, synthetic construct
  misc_feature 1..18: note = Synthetic
  source 1..18: mol_type = other RNA
tcgtcaaggctcacgtgc

SEQ ID NO: 15641 - RNA, 19 nt, synthetic construct
  misc_feature 1..19: note = Synthetic
  source 1..19: mol_type = other RNA
ttcgtcaaggctcacgtgc

SEQ ID NO: 15642 - RNA, 21 nt, synthetic construct
  misc_feature 1..21: note = Synthetic
  source 1..21: mol_type = other RNA
tcttcgtcaaggctcacgtgc

SEQ ID NO: 15643 - RNA, 22 nt, synthetic construct
  misc_feature 1..22: note = Synthetic
  source 1..22: mol_type = other RNA
ttcttcgtcaaggctcacgtgc

SEQ ID NO: 15644 - RNA, 23 nt, synthetic construct
  misc_feature 1..23: note = Synthetic
  source 1..23: mol_type = other RNA
gttcttcgtcaaggctcacgtgc

SEQ ID NO: 15645 - RNA, 24 nt, synthetic construct
  misc_feature 1..24: note = Synthetic
  source 1..24: mol_type = other RNA
tgttcttcgtcaaggctcacgtgc

SEQ ID NO: 15646 - RNA, 18 nt, synthetic construct
  misc_feature 1..18: note = Synthetic
  source 1..18: mol_type = other RNA
gacccggagagggacatc

SEQ ID NO: 15647 - RNA, 19 nt, synthetic construct
  misc_feature 1..19: note = Synthetic
  source 1..19: mol_type = other RNA
cgacccggagagggacatc

SEQ ID NO: 15648 - RNA, 21 nt, synthetic construct
  misc_feature 1..21: note = Synthetic
  source 1..21: mol_type = other RNA
accgacccggagagggacatc

SEQ ID NO: 15649 - RNA, 22 nt, synthetic construct
  misc_feature 1..22: note = Synthetic
  source 1..22: mol_type = other RNA
caccgacccggagagggacatc

SEQ ID NO: 15650 - RNA, 23 nt, synthetic construct
  misc_feature 1..23: note = Synthetic
  source 1..23: mol_type = other RNA
tcaccgacccggagagggacatc

SEQ ID NO: 15651 - RNA, 24 nt, synthetic construct
  misc_feature 1..24: note = Synthetic
  source 1..24: mol_type = other RNA
atcaccgacccggagagggacatc

SEQ ID NO: 15652 - RNA, 18 nt, synthetic construct
  misc_feature 1..18: note = Synthetic
  source 1..18: mol_type = other RNA
ttaagtttttgccccatc

SEQ ID NO: 15653 - RNA, 19 nt, synthetic construct
  misc_feature 1..19: note = Synthetic
  source 1..19: mol_type = other RNA
tttaagtttttgccccatc

SEQ ID NO: 15654 - RNA, 21 nt, synthetic construct
  misc_feature 1..21: note = Synthetic
  source 1..21: mol_type = other RNA
tttttaagtttttgccccatc

SEQ ID NO: 15655 - RNA, 22 nt, synthetic construct
  misc_feature 1..22: note = Synthetic
  source 1..22: mol_type = other RNA
ttttttaagtttttgccccatc

SEQ ID NO: 15656 - RNA, 23 nt, synthetic construct
  misc_feature 1..23: note = Synthetic
  source 1..23: mol_type = other RNA
gttttttaagtttttgccccatc

SEQ ID NO: 15657 - RNA, 24 nt, synthetic construct
  misc_feature 1..24: note = Synthetic
  source 1..24: mol_type = other RNA
tgttttttaagtttttgccccatc

SEQ ID NO: 15658 - RNA, 18 nt, synthetic construct
  misc_feature 1..18: note = Synthetic
  source 1..18: mol_type = other RNA
aacttctgcccggccatc

SEQ ID NO: 15659 - RNA, 19 nt, synthetic construct
  misc_feature 1..19: note = Synthetic
  source 1..19: mol_type = other RNA
caacttctgcccggccatc

SEQ ID NO: 15660 - RNA, 21 nt, synthetic construct
  misc_feature 1..21: note = Synthetic
  source 1..21: mol_type = other RNA
gacaacttctgcccggccatc

SEQ ID NO: 15661 - RNA, 22 nt, synthetic construct
  misc_feature 1..22: note = Synthetic
  source 1..22: mol_type = other RNA
cgacaacttctgcccggccatc

SEQ ID NO: 15662 - RNA, 23 nt, synthetic construct
  misc_feature 1..23: note = Synthetic
  source 1..23: mol_type = other RNA
gcgacaacttctgcccggccatc

SEQ ID NO: 15663 - RNA, 24 nt, synthetic construct
  misc_feature 1..24: note = Synthetic
  source 1..24: mol_type = other RNA
tgcgacaacttctgcccggccatc

SEQ ID NO: 15664 - RNA, 18 nt, synthetic construct
  misc_feature 1..18: note = Synthetic
  source 1..18: mol_type = other RNA
gcggacaacctggccatc

SEQ ID NO: 15665 - RNA, 19 nt, synthetic construct
  misc_feature 1..19: note = Synthetic
  source 1..19: mol_type = other RNA
ggcggacaacctggccatc

SEQ ID NO: 15666 - RNA, 21 nt, synthetic construct
  misc_feature 1..21: note = Synthetic
  source 1..21: mol_type = other RNA
acggcggacaacctggccatc

SEQ ID NO: 15667 - RNA, 22 nt, synthetic construct
  misc_feature 1..22: note = Synthetic
  source 1..22: mol_type = other RNA
tacggcggacaacctggccatc

SEQ ID NO: 15668 - RNA, 23 nt, synthetic construct
  misc_feature 1..23: note = Synthetic
  source 1..23: mol_type = other RNA
gtacggcggacaacctggccatc

SEQ ID NO: 15669 - RNA, 24 nt, synthetic construct
  misc_feature 1..24: note = Synthetic
  source 1..24: mol_type = other RNA
tgtacggcggacaacctggccatc

SEQ ID NO: 15670 - RNA, 18 nt, synthetic construct
  misc_feature 1..18: note = Synthetic
  source 1..18: mol_type = other RNA
gcgcaggtcccgtccatc

SEQ ID NO: 15671 - RNA, 19 nt, synthetic construct
  misc_feature 1..19: note = Synthetic
  source 1..19: mol_type = other RNA
cgcgcaggtcccgtccatc

SEQ ID NO: 15672 - RNA, 21 nt, synthetic construct
  misc_feature 1..21: note = Synthetic
  source 1..21: mol_type = other RNA
cgcgcgcaggtcccgtccatc

SEQ ID NO: 15673 - RNA, 22 nt, synthetic construct
  misc_feature 1..22: note = Synthetic
  source 1..22: mol_type = other RNA
ccgcgcgcaggtcccgtccatc

SEQ ID NO: 15674 - RNA, 23 nt, synthetic construct
  misc_feature 1..23: note = Synthetic
  source 1..23: mol_type = other RNA
gccgcgcgcaggtcccgtccatc

SEQ ID NO: 15675 - RNA, 24 nt, synthetic construct
  misc_feature 1..24: note = Synthetic
  source 1..24: mol_type = other RNA
cgccgcgcgcaggtcccgtccatc

SEQ ID NO: 15676 - RNA, 18 nt, synthetic construct
  misc_feature 1..18: note = Synthetic
  source 1..18: mol_type = other RNA
gggggtaagatgctcatc

SEQ ID NO: 15677 - RNA, 19 nt, synthetic construct
  misc_feature 1..19: note = Synthetic
  source 1..19: mol_type = other RNA
cgggggtaagatgctcatc

SEQ ID NO: 15678 - RNA, 21 nt, synthetic construct
  misc_feature 1..21: note = Synthetic
  source 1..21: mol_type = other RNA
tacgggggtaagatgctcatc

SEQ ID NO: 15679 - RNA, 22 nt, synthetic construct
  misc_feature 1..22: note = Synthetic
  source 1..22: mol_type = other RNA
ctacgggggtaagatgctcatc

SEQ ID NO: 15680 - RNA, 23 nt, synthetic construct
  misc_feature 1..23: note = Synthetic
  source 1..23: mol_type = other RNA
tctacgggggtaagatgctcatc

SEQ ID NO: 15681 - RNA, 24 nt, synthetic construct
  misc_feature 1..24: note = Synthetic
  source 1..24: mol_type = other RNA
atctacgggggtaagatgctcatc

SEQ ID NO: 15682 - RNA, 18 nt, synthetic construct
  misc_feature 1..18: note = Synthetic
  source 1..18: mol_type = other RNA
gccaccacccggttcatc

SEQ ID NO: 15683 - RNA, 19 nt, synthetic construct
  misc_feature 1..19: note = Synthetic
  source 1..19: mol_type = other RNA
cgccaccacccggttcatc

SEQ ID NO: 15684 - RNA, 21 nt, synthetic construct
  misc_feature 1..21: note = Synthetic
  source 1..21: mol_type = other RNA
gacgccaccacccggttcatc

SEQ ID NO: 15685 - RNA, 22 nt, synthetic construct
  misc_feature 1..22: note = Synthetic
  source 1..22: mol_type = other RNA
cgacgccaccacccggttcatc

SEQ ID NO: 15686 - RNA, 23 nt, synthetic construct
  misc_feature 1..23: note = Synthetic
  source 1..23: mol_type = other RNA
tcgacgccaccacccggttcatc

SEQ ID NO: 15687 - RNA, 24 nt, synthetic construct
  misc_feature 1..24: note = Synthetic
  source 1..24: mol_type = other RNA
gtcgacgccaccacccggttcatc

SEQ ID NO: 15688 - RNA, 18 nt, synthetic construct
  misc_feature 1..18: note = Synthetic
  source 1..18: mol_type = other RNA
cgctcctgggcctgactc

SEQ ID NO: 15689 - RNA, 19 nt, synthetic construct
  misc_feature 1..19: note = Synthetic
  source 1..19: mol_type = other RNA
acgctcctgggcctgactc

SEQ ID NO: 15690 - RNA, 21 nt, synthetic construct
  misc_feature 1..21: note = Synthetic
  source 1..21: mol_type = other RNA
tcacgctcctgggcctgactc

SEQ ID NO: 15691 - RNA, 22 nt, synthetic construct
  misc_feature 1..22: note = Synthetic
  source 1..22: mol_type = other RNA
atcacgctcctgggcctgactc

SEQ ID NO: 15692 - RNA, 23 nt, synthetic construct
  misc_feature 1..23: note = Synthetic
  source 1..23: mol_type = other RNA
catcacgctcctgggcctgactc

SEQ ID NO: 15693 - RNA, 24 nt, synthetic construct
  misc_feature 1..24: note = Synthetic
  source 1..24: mol_type = other RNA
tcatcacgctcctgggcctgactc

SEQ ID NO: 15694 - RNA, 18 nt, synthetic construct
  misc_feature 1..18: note = Synthetic
  source 1..18: mol_type = other RNA
gtttatcaaccgcacctc

SEQ ID NO: 15695 - RNA, 19 nt, synthetic construct
  misc_feature 1..19: note = Synthetic
  source 1..19: mol_type = other RNA
cgtttatcaaccgcacctc

SEQ ID NO: 15696 - RNA, 21 nt, synthetic construct
  misc_feature 1..21: note = Synthetic
  source 1..21: mol_type = other RNA
cgcgtttatcaaccgcacctc

SEQ ID NO: 15697 - RNA, 22 nt, synthetic construct
  misc_feature 1..22: note = Synthetic
  source 1..22: mol_type = other RNA
gcgcgtttatcaaccgcacctc

SEQ ID NO: 15698 - RNA, 23 nt, synthetic construct
  misc_feature 1..23: note = Synthetic
  source 1..23: mol_type = other RNA
tgcgcgtttatcaaccgcacctc

SEQ ID NO: 15699 - RNA, 24 nt, synthetic construct
  misc_feature 1..24: note = Synthetic
  source 1..24: mol_type = other RNA
ctgcgcgtttatcaaccgcacctc

SEQ ID NO: 15700 - RNA, 18 nt, synthetic construct
  misc_feature 1..18: note = Synthetic
  source 1..18: mol_type = other RNA
accgacaagatcaagctc

SEQ ID NO: 15701 - RNA, 19 nt, synthetic construct
  misc_feature 1..19: note = Synthetic
  source 1..19: mol_type = other RNA
aaccgacaagatcaagctc

SEQ ID NO: 15702 - RNA, 21 nt, synthetic construct
  misc_feature 1..21: note = Synthetic
  source 1..21: mol_type = other RNA
ataaccgacaagatcaagctc

SEQ ID NO: 15703 - RNA, 22 nt, synthetic construct
  misc_feature 1..22: note = Synthetic
  source 1..22: mol_type = other RNA
tataaccgacaagatcaagctc

SEQ ID NO: 15704 - RNA, 23 nt, synthetic construct
  misc_feature 1..23: note = Synthetic
  source 1..23: mol_type = other RNA
ttataaccgacaagatcaagctc

SEQ ID NO: 15705 - RNA, 24 nt, synthetic construct
  misc_feature 1..24: note = Synthetic
  source 1..24: mol_type = other RNA
attataaccgacaagatcaagctc

SEQ ID NO: 15706 - RNA, 18 nt, synthetic construct
  misc_feature 1..18: note = Synthetic
  source 1..18: mol_type = other RNA
gggaccgtcatcacgctc

SEQ ID NO: 15707 - RNA, 19 nt, synthetic construct
  misc_feature 1..19: note = Synthetic
  source 1..19: mol_type = other RNA
ggggaccgtcatcacgctc

SEQ ID NO: 15708 - RNA, 21 nt, synthetic construct
  misc_feature 1..21: note = Synthetic
  source 1..21: mol_type = other RNA
acggggaccgtcatcacgctc

SEQ ID NO: 15709 - RNA, 22 nt, synthetic construct
  misc_feature 1..22: note = Synthetic
  source 1..22: mol_type = other RNA
gacggggaccgtcatcacgctc

SEQ ID NO: 15710 - RNA, 23 nt, synthetic construct
  misc_feature 1..23: note = Synthetic
  source 1..23: mol_type = other RNA
cgacggggaccgtcatcacgctc

SEQ ID NO: 15711 - RNA, 24 nt, synthetic construct
  misc_feature 1..24: note = Synthetic
  source 1..24: mol_type = other RNA
ccgacggggaccgtcatcacgctc

SEQ ID NO: 15712 - RNA, 18 nt, synthetic construct
  misc_feature 1..18: note = Synthetic
  source 1..18: mol_type = other RNA
cccgaggaggccgtgctc

SEQ ID NO: 15713 - RNA, 19 nt, synthetic construct
  misc_feature 1..19: note = Synthetic
  source 1..19: mol_type = other RNA
ccccgaggaggccgtgctc

SEQ ID NO: 15714 - RNA, 21 nt, synthetic construct
  misc_feature 1..21: note = Synthetic
  source 1..21: mol_type = other RNA
agccccgaggaggccgtgctc

SEQ ID NO: 15715 - RNA, 22 nt, synthetic construct
  misc_feature 1..22: note = Synthetic
  source 1..22: mol_type = other RNA
cagccccgaggaggccgtgctc

SEQ ID NO: 15716 - RNA, 23 nt, synthetic construct
  misc_feature 1..23: note = Synthetic
  source 1..23: mol_type = other RNA
gcagccccgaggaggccgtgctc

SEQ ID NO: 15717 - RNA, 24 nt, synthetic construct
  misc_feature 1..24: note = Synthetic
  source 1..24: mol_type = other RNA
agcagccccgaggaggccgtgctc

SEQ ID NO: 15718 - RNA, 18 nt, synthetic construct
  misc_feature 1..18: note = Synthetic
  source 1..18: mol_type = other RNA
ttacgacgataccgtctc

SEQ ID NO: 15719 - RNA, 19 nt, synthetic construct
  misc_feature 1..19: note = Synthetic
  source 1..19: mol_type = other RNA
tttacgacgataccgtctc

SEQ ID NO: 15720 - RNA, 21 nt, synthetic construct
  misc_feature 1..21: note = Synthetic
  source 1..21: mol_type = other RNA
gttttacgacgataccgtctc

SEQ ID NO: 15721 - RNA, 22 nt, synthetic construct
  misc_feature 1..22: note = Synthetic
  source 1..22: mol_type = other RNA
tgttttacgacgataccgtctc

SEQ ID NO: 15722 - RNA, 23 nt, synthetic construct
  misc_feature 1..23: note = Synthetic
  source 1..23: mol_type = other RNA
ctgttttacgacgataccgtctc

SEQ ID NO: 15723 - RNA, 24 nt, synthetic construct
  misc_feature 1..24: note = Synthetic
  source 1..24: mol_type = other RNA
gctgttttacgacgataccgtctc

SEQ ID NO: 15724 - RNA, 18 nt, synthetic construct
  misc_feature 1..18: note = Synthetic
  source 1..18: mol_type = other RNA
gccgtggccgaagccgtc

SEQ ID NO: 15725 - RNA, 19 nt, synthetic construct
  misc_feature 1..19: note = Synthetic
  source 1..19: mol_type = other RNA
cgccgtggccgaagccgtc

SEQ ID NO: 15726 - RNA, 21 nt, synthetic construct
  misc_feature 1..21: note = Synthetic
  source 1..21: mol_type = other RNA
aacgccgtggccgaagccgtc

SEQ ID NO: 15727 - RNA, 22 nt, synthetic construct
  misc_feature 1..22: note = Synthetic
  source 1..22: mol_type = other RNA
caacgccgtggccgaagccgtc

SEQ ID NO: 15728 - RNA, 23 nt, synthetic construct
  misc_feature 1..23: note = Synthetic
  source 1..23: mol_type = other RNA
tcaacgccgtggccgaagccgtc

SEQ ID NO: 15729 - RNA, 24 nt, synthetic construct
  misc_feature 1..24: note = Synthetic
  source 1..24: mol_type = other RNA
ctcaacgccgtggccgaagccgtc

SEQ ID NO: 15730 - RNA, 18 nt, synthetic construct
  misc_feature 1..18: note = Synthetic
  source 1..18: mol_type = other RNA
tgttaaaaaggtttattc

SEQ ID NO: 15731 - RNA, 19 nt, synthetic construct
  misc_feature 1..19: note = Synthetic
  source 1..19: mol_type = other RNA
ctgttaaaaaggtttattc

SEQ ID NO: 15732 - RNA, 21 nt, synthetic construct
  misc_feature 1..21: note = Synthetic
  source 1..21: mol_type = other RNA
gtctgttaaaaaggtttattc

SEQ ID NO: 15733 - RNA, 22 nt, synthetic construct
  misc_feature 1..22: note = Synthetic
  source 1..22: mol_type = other RNA
agtctgttaaaaaggtttattc

SEQ ID NO: 15734 - RNA, 23 nt, synthetic construct
  misc_feature 1..23: note = Synthetic
  source 1..23: mol_type = other RNA
gagtctgttaaaaaggtttattc

SEQ ID NO: 15735 - RNA, 24 nt, synthetic construct
  misc_feature 1..24: note = Synthetic
  source 1..24: mol_type = other RNA
agagtctgttaaaaaggtttattc

SEQ ID NO: 15736 - RNA, 18 nt, synthetic construct
  misc_feature 1..18: note = Synthetic
  source 1..18: mol_type = other RNA
ataggccagagccacttc

SEQ ID NO: 15737 - RNA, 19 nt, synthetic construct
  misc_feature 1..19: note = Synthetic
  source 1..19: mol_type = other RNA
cataggccagagccacttc

SEQ ID NO: 15738 - RNA, 21 nt, synthetic construct
  misc_feature 1..21: note = Synthetic
  source 1..21: mol_type = other RNA
gacataggccagagccacttc

SEQ ID NO: 15739 - RNA, 22 nt, synthetic construct
  misc_feature 1..22: note = Synthetic
  source 1..22: mol_type = other RNA
ggacataggccagagccacttc

SEQ ID NO: 15740 - RNA, 23 nt, synthetic construct
  misc_feature 1..23: note = Synthetic
  source 1..23: mol_type = other RNA
gggacataggccagagccacttc

SEQ ID NO: 15741 - RNA, 24 nt, synthetic construct
  misc_feature 1..24: note = Synthetic
  source 1..24: mol_type = other RNA
tgggacataggccagagccacttc

SEQ ID NO: 15742 - RNA, 18 nt, synthetic construct
  misc_feature 1..18: note = Synthetic
  source 1..18: mol_type = other RNA
aactcggtgtacgggttc

SEQ ID NO: 15743 - RNA, 19 nt, synthetic construct
  misc_feature 1..19: note = Synthetic
  source 1..19: mol_type = other RNA
taactcggtgtacgggttc

SEQ ID NO: 15744 - RNA, 21 nt, synthetic construct
  misc_feature 1..21: note = Synthetic
  source 1..21: mol_type = other RNA
tgtaactcggtgtacgggttc

SEQ ID NO: 15745 - RNA, 22 nt, synthetic construct
  misc_feature 1..22: note = Synthetic
  source 1..22: mol_type = other RNA
gtgtaactcggtgtacgggttc

SEQ ID NO: 15746 - RNA, 23 nt, synthetic construct
  misc_feature 1..23: note = Synthetic
  source 1..23: mol_type = other RNA
tgtgtaactcggtgtacgggttc

SEQ ID NO: 15747 - RNA, 24 nt, synthetic construct
  misc_feature 1..24: note = Synthetic
  source 1..24: mol_type = other RNA
gtgtgtaactcggtgtacgggttc

SEQ ID NO: 15748 - RNA, 18 nt, synthetic construct
  misc_feature 1..18: note = Synthetic
  source 1..18: mol_type = other RNA
cagctcctggccgatttc

SEQ ID NO: 15749 - RNA, 19 nt, synthetic construct
  misc_feature 1..19: note = Synthetic
  source 1..19: mol_type = other RNA
acagctcctggccgatttc

SEQ ID NO: 15750 - RNA, 21 nt, synthetic construct
  misc_feature 1..21: note = Synthetic
  source 1..21: mol_type = other RNA
gaacagctcctggccgatttc

SEQ ID NO: 15751 - RNA, 22 nt, synthetic construct
  misc_feature 1..22: note = Synthetic
  source 1..22: mol_type = other RNA
cgaacagctcctggccgatttc

SEQ ID NO: 15752 - RNA, 23 nt, synthetic construct
  misc_feature 1..23: note = Synthetic
  source 1..23: mol_type = other RNA
tcgaacagctcctggccgatttc

SEQ ID NO: 15753 - RNA, 24 nt, synthetic construct
  misc_feature 1..24: note = Synthetic
  source 1..24: mol_type = other RNA
ttcgaacagctcctggccgatttc

SEQ ID NO: 15754 - RNA, 18 nt, synthetic construct
  misc_feature 1..18: note = Synthetic
  source 1..18: mol_type = other RNA
aagcgcagcaagataaag

SEQ ID NO: 15755 - RNA, 19 nt, synthetic construct
  misc_feature 1..19: note = Synthetic
  source 1..19: mol_type = other RNA
gaagcgcagcaagataaag

SEQ ID NO: 15756 - RNA, 21 nt, synthetic construct
  misc_feature 1..21: note = Synthetic
  source 1..21: mol_type = other RNA
cagaagcgcagcaagataaag

SEQ ID NO: 15757 - RNA, 22 nt, synthetic construct
  misc_feature 1..22: note = Synthetic
  source 1..22: mol_type = other RNA
ccagaagcgcagcaagataaag

SEQ ID NO: 15758 - RNA, 23 nt, synthetic construct
  misc_feature 1..23: note = Synthetic
  source 1..23: mol_type = other RNA
tccagaagcgcagcaagataaag

SEQ ID NO: 15759 - RNA, 24 nt, synthetic construct
  misc_feature 1..24: note = Synthetic
  source 1..24: mol_type = other RNA
ttccagaagcgcagcaagataaag

SEQ ID NO: 15760 - RNA, 18 nt, synthetic construct
  misc_feature 1..18: note = Synthetic
  source 1..18: mol_type = other RNA
tacttttacatgaacaag

SEQ ID NO: 15761 - RNA, 19 nt, synthetic construct
  misc_feature 1..19: note = Synthetic
  source 1..19: mol_type = other RNA
gtacttttacatgaacaag

SEQ ID NO: 15762 - RNA, 21 nt, synthetic construct
  misc_feature 1..21: note = Synthetic
  source 1..21: mol_type = other RNA
cagtacttttacatgaacaag

SEQ ID NO: 15763 - RNA, 22 nt, synthetic construct
  misc_feature 1..22: note = Synthetic
  source 1..22: mol_type = other RNA
gcagtacttttacatgaacaag

SEQ ID NO: 15764 - RNA, 23 nt, synthetic construct
  misc_feature 1..23: note = Synthetic
  source 1..23: mol_type = other RNA
ggcagtacttttacatgaacaag

SEQ ID NO: 15765 - RNA, 24 nt, synthetic construct
  misc_feature 1..24: note = Synthetic
  source 1..24: mol_type = other RNA
cggcagtacttttacatgaacaag

SEQ ID NO: 15766 - RNA, 18 nt, synthetic construct
  misc_feature 1..18: note = Synthetic
  source 1..18: mol_type = other RNA
gccgtcctgaaggacaag

SEQ ID NO: 15767 - RNA, 19 nt, synthetic construct
  misc_feature 1..19: note = Synthetic
  source 1..19: mol_type = other RNA
agccgtcctgaaggacaag

SEQ ID NO: 15768 - RNA, 21 nt, synthetic construct
  misc_feature 1..21: note = Synthetic
  source 1..21: mol_type = other RNA
gaagccgtcctgaaggacaag

SEQ ID NO: 15769 - RNA, 22 nt, synthetic construct
  misc_feature 1..22: note = Synthetic
  source 1..22: mol_type = other RNA
cgaagccgtcctgaaggacaag

SEQ ID NO: 15770 - RNA, 23 nt, synthetic construct
  misc_feature 1..23: note = Synthetic
  source 1..23: mol_type = other RNA
ccgaagccgtcctgaaggacaag

SEQ ID NO: 15771 - RNA, 24 nt, synthetic construct
  misc_feature 1..24: note = Synthetic
  source 1..24: mol_type = other RNA
gccgaagccgtcctgaaggacaag

SEQ ID NO: 15772 - RNA, 18 nt, synthetic construct
  misc_feature 1..18: note = Synthetic
  source 1..18: mol_type = other RNA
ttcgatatcgaatgcaag

SEQ ID NO: 15773 - RNA, 19 nt, synthetic construct
  misc_feature 1..19: note = Synthetic
  source 1..19: mol_type = other RNA
cttcgatatcgaatgcaag

SEQ ID NO: 15774 - RNA, 21 nt, synthetic construct
  misc_feature 1..21: note = Synthetic
  source 1..21: mol_type = other RNA
tgcttcgatatcgaatgcaag

SEQ ID NO: 15775 - RNA, 22 nt, synthetic construct
  misc_feature 1..22: note = Synthetic
  source 1..22: mol_type = other RNA
gtgcttcgatatcgaatgcaag

SEQ ID NO: 15776 - RNA, 23 nt, synthetic construct
  misc_feature 1..23: note = Synthetic
  source 1..23: mol_type = other RNA
tgtgcttcgatatcgaatgcaag

SEQ ID NO: 15777 - RNA, 24 nt, synthetic construct
  misc_feature 1..24: note = Synthetic
  source 1..24: mol_type = other RNA
atgtgcttcgatatcgaatgcaag

SEQ ID NO: 15778 - RNA, 18 nt, synthetic construct
  misc_feature 1..18: note = Synthetic
  source 1..18: mol_type = other RNA
gtcctgaaggacaagaag

SEQ ID NO: 15779 - RNA, 19 nt, synthetic construct
  misc_feature 1..19: note = Synthetic
  source 1..19: mol_type = other RNA
cgtcctgaaggacaagaag

SEQ ID NO: 15780 - RNA, 21 nt, synthetic construct
  misc_feature 1..21: note = Synthetic
  source 1..21: mol_type = other RNA
gccgtcctgaaggacaagaag

SEQ ID NO: 15781 - RNA, 22 nt, synthetic construct
  misc_feature 1..22: note = Synthetic
  source 1..22: mol_type = other RNA
agccgtcctgaaggacaagaag

SEQ ID NO: 15782 - RNA, 23 nt, synthetic construct
  misc_feature 1..23: note = Synthetic
  source 1..23: mol_type = other RNA
aagccgtcctgaaggacaagaag

SEQ ID NO: 15783 - RNA, 24 nt, synthetic construct
  misc_feature 1..24: note = Synthetic
  source 1..24: mol_type = other RNA
gaagccgtcctgaaggacaagaag

SEQ ID NO: 15784 - RNA, 18 nt, synthetic construct
  misc_feature 1..18: note = Synthetic
  source 1..18: mol_type = other RNA
ctgcgcctggccgaccag

SEQ ID NO: 15785 - RNA, 19 nt, synthetic construct
  misc_feature 1..19: note = Synthetic
  source 1..19: mol_type = other RNA
gctgcgcctggccgaccag

SEQ ID NO: 15786 - RNA, 21 nt, synthetic construct
  misc_feature 1..21: note = Synthetic
  source 1..21: mol_type = other RNA
ctgctgcgcctggccgaccag

SEQ ID NO: 15787 - RNA, 22 nt, synthetic construct
  misc_feature 1..22: note = Synthetic
  source 1..22: mol_type = other RNA
cctgctgcgcctggccgaccag

SEQ ID NO: 15788 - RNA, 23 nt, synthetic construct
  misc_feature 1..23: note = Synthetic
  source 1..23: mol_type = other RNA
gcctgctgcgcctggccgaccag

SEQ ID NO: 15789 - RNA, 24 nt, synthetic construct
  misc_feature 1..24: note = Synthetic
  source 1..24: mol_type = other RNA
tgcctgctgcgcctggccgaccag

SEQ ID NO: 15790 - RNA, 18 nt, synthetic construct
  misc_feature 1..18: note = Synthetic
  source 1..18: mol_type = other RNA
aggacgaggagcggccag

SEQ ID NO: 15791 - RNA, 19 nt, synthetic construct
  misc_feature 1..19: note = Synthetic
  source 1..19: mol_type = other RNA
gaggacgaggagcggccag

SEQ ID NO: 15792 - RNA, 21 nt, synthetic construct
  misc_feature 1..21: note = Synthetic
  source 1..21: mol_type = other RNA
gggaggacgaggagcggccag

SEQ ID NO: 15793 - RNA, 22 nt, synthetic construct
  misc_feature 1..22: note = Synthetic
  source 1..22: mol_type = other RNA
cgggaggacgaggagcggccag

SEQ ID NO: 15794 - RNA, 23 nt, synthetic construct
  misc_feature 1..23: note = Synthetic
  source 1..23: mol_type = other RNA
ccgggaggacgaggagcggccag

SEQ ID NO: 15795 - RNA, 24 nt, synthetic construct
  misc_feature 1..24: note = Synthetic
  source 1..24: mol_type = other RNA
cccgggaggacgaggagcggccag

SEQ ID NO: 15796 - RNA, 18 nt, synthetic construct
  misc_feature 1..18: note = Synthetic
  source 1..18: mol_type = other RNA
gacgaggagcggccagag

SEQ ID NO: 15797 - RNA, 19 nt, synthetic construct
  misc_feature 1..19: note = Synthetic
  source 1..19: mol_type = other RNA
ggacgaggagcggccagag

SEQ ID NO: 15798 - RNA, 21 nt, synthetic construct
  misc_feature 1..21: note = Synthetic
  source 1..21: mol_type = other RNA
gaggacgaggagcggccagag

SEQ ID NO: 15799 - RNA, 22 nt, synthetic construct
  misc_feature 1..22: note = Synthetic
  source 1..22: mol_type = other RNA
ggaggacgaggagcggccagag

SEQ ID NO: 15800 - RNA, 23 nt, synthetic construct
  misc_feature 1..23: note = Synthetic
  source 1..23: mol_type = other RNA
gggaggacgaggagcggccagag

SEQ ID NO: 15801 - RNA, 24 nt, synthetic construct
  misc_feature 1..24: note = Synthetic
  source 1..24: mol_type = other RNA
cgggaggacgaggagcggccagag

SEQ ID NO: 15802 - RNA, 18 nt, synthetic construct
  misc_feature 1..18: note = Synthetic
  source 1..18: mol_type = other RNA
gacgaggacgaacgcgag

SEQ ID NO: 15803 - RNA, 19 nt, synthetic construct
  misc_feature 1..19: note = Synthetic
  source 1..19: mol_type = other RNA
ggacgaggacgaacgcgag

SEQ ID NO: 15804 - RNA, 21 nt, synthetic construct
  misc_feature 1..21: note = Synthetic
  source 1..21: mol_type = other RNA
gaggacgaggacgaacgcgag

SEQ ID NO: 15805 - RNA, 22 nt, synthetic construct
  misc_feature 1..22: note = Synthetic
  source 1..22: mol_type = other RNA
ggaggacgaggacgaacgcgag

SEQ ID NO: 15806 - RNA, 23 nt, synthetic construct
  misc_feature 1..23: note = Synthetic
  source 1..23: mol_type = other RNA
gggaggacgaggacgaacgcgag

SEQ ID NO: 15807 - RNA, 24 nt, synthetic construct
  misc_feature 1..24: note = Synthetic
  source 1..24: mol_type = other RNA
ggggaggacgaggacgaacgcgag

SEQ ID NO: 15808 - RNA, 18 nt, synthetic construct
  misc_feature 1..18: note = Synthetic
  source 1..18: mol_type = other RNA
gaggagggcgggggcgag

SEQ ID NO: 15809 - RNA, 19 nt, synthetic construct
  misc_feature 1..19: note = Synthetic
  source 1..19: mol_type = other RNA
cgaggagggcgggggcgag

SEQ ID NO: 15810 - RNA, 21 nt, synthetic construct
  misc_feature 1..21: note = Synthetic
  source 1..21: mol_type = other RNA
cgcgaggagggcgggggcgag

SEQ ID NO: 15811 - RNA, 22 nt, synthetic construct
  misc_feature 1..22: note = Synthetic
  source 1..22: mol_type = other RNA
acgcgaggagggcgggggcgag

SEQ ID NO: 15812 - RNA, 23 nt, synthetic construct
  misc_feature 1..23: note = Synthetic
  source 1..23: mol_type = other RNA
aacgcgaggagggcgggggcgag

SEQ ID NO: 15813 - RNA, 24 nt, synthetic construct
  misc_feature 1..24: note = Synthetic
  source 1..24: mol_type = other RNA
gaacgcgaggagggcgggggcgag

SEQ ID NO: 15814 - RNA, 18 nt, synthetic construct
  misc_feature 1..18: note = Synthetic
  source 1..18: mol_type = other RNA
gacaacctggccatcgag

SEQ ID NO: 15815 - RNA, 19 nt, synthetic construct
  misc_feature 1..19: note = Synthetic
  source 1..19: mol_type = other RNA
ggacaacctggccatcgag

SEQ ID NO: 15816 - RNA, 21 nt, synthetic construct
  misc_feature 1..21: note = Synthetic
  source 1..21: mol_type = other RNA
gcggacaacctggccatcgag

SEQ ID NO: 15817 - RNA, 22 nt, synthetic construct
  misc_feature 1..22: note = Synthetic
  source 1..22: mol_type = other RNA
ggcggacaacctggccatcgag

SEQ ID NO: 15818 - RNA, 23 nt, synthetic construct
  misc_feature 1..23: note = Synthetic
  source 1..23: mol_type = other RNA
cggcggacaacctggccatcgag

SEQ ID NO: 15819 - RNA, 24 nt, synthetic construct
  misc_feature 1..24: note = Synthetic
  source 1..24: mol_type = other RNA
acggcggacaacctggccatcgag

SEQ ID NO: 15820 - RNA, 18 nt, synthetic construct
  misc_feature 1..18: note = Synthetic
  source 1..18: mol_type = other RNA
gactacctggagatcgag

SEQ ID NO: 15821 - RNA, 19 nt, synthetic construct
  misc_feature 1..19: note = Synthetic
  source 1..19: mol_type = other RNA
ggactacctggagatcgag

SEQ ID NO: 15822 - RNA, 21 nt, synthetic construct
  misc_feature 1..21: note = Synthetic
  source 1..21: mol_type = other RNA
aaggactacctggagatcgag

SEQ ID NO: 15823 - RNA, 22 nt, synthetic construct
  misc_feature 1..22: note = Synthetic
  source 1..22: mol_type = other RNA
caaggactacctggagatcgag

SEQ ID NO: 15824 - RNA, 23 nt, synthetic construct
  misc_feature 1..23: note = Synthetic
  source 1..23: mol_type = other RNA
gcaaggactacctggagatcgag

SEQ ID NO: 15825 - RNA, 24 nt, synthetic construct
  misc_feature 1..24: note = Synthetic
  source 1..24: mol_type = other RNA
ggcaaggactacctggagatcgag

SEQ ID NO: 15826 - RNA, 18 nt, synthetic construct
  misc_feature 1..18: note = Synthetic
  source 1..18: mol_type = other RNA
tccgcggaccacttcgag

SEQ ID NO: 15827 - RNA, 19 nt, synthetic construct
  misc_feature 1..19: note = Synthetic
  source 1..19: mol_type = other RNA
ctccgcggaccacttcgag

SEQ ID NO: 15828 - RNA, 21 nt, synthetic construct
  misc_feature 1..21: note = Synthetic
  source 1..21: mol_type = other RNA
atctccgcggaccacttcgag

SEQ ID NO: 15829 - RNA, 22 nt, synthetic construct
  misc_feature 1..22: note = Synthetic
  source 1..22: mol_type = other RNA
catctccgcggaccacttcgag

SEQ ID NO: 15830 - RNA, 23 nt, synthetic construct
  misc_feature 1..23: note = Synthetic
  source 1..23: mol_type = other RNA
gcatctccgcggaccacttcgag

SEQ ID NO: 15831 - RNA, 24 nt, synthetic construct
  misc_feature 1..24: note = Synthetic
  source 1..24: mol_type = other RNA
ggcatctccgcggaccacttcgag

SEQ ID NO: 15832 - RNA, 18 nt, synthetic construct
  misc_feature 1..18: note = Synthetic
  source 1..18: mol_type = other RNA
gaggagcggccagaggag

SEQ ID NO: 15833 - RNA, 19 nt, synthetic construct
  misc_feature 1..19: note = Synthetic
  source 1..19: mol_type = other RNA
cgaggagcggccagaggag

SEQ ID NO: 15834 - RNA, 21 nt, synthetic construct
  misc_feature 1..21: note = Synthetic
  source 1..21: mol_type = other RNA
gacgaggagcggccagaggag

SEQ ID NO: 15835 - RNA, 22 nt, synthetic construct
  misc_feature 1..22: note = Synthetic
  source 1..22: mol_type = other RNA
ggacgaggagcggccagaggag

SEQ ID NO: 15836 - RNA, 23 nt, synthetic construct
  misc_feature 1..23: note = Synthetic
  source 1..23: mol_type = other RNA
aggacgaggagcggccagaggag

SEQ ID NO: 15837 - RNA, 24 nt, synthetic construct
  misc_feature 1..24: note = Synthetic
  source 1..24: mol_type = other RNA
gaggacgaggagcggccagaggag

SEQ ID NO: 15838 - RNA, 18 nt, synthetic construct
  misc_feature 1..18: note = Synthetic
  source 1..18: mol_type = other RNA
gagcggccagaggaggag

SEQ ID NO: 15839 - RNA, 19 nt, synthetic construct
  misc_feature 1..19: note = Synthetic
  source 1..19: mol_type = other RNA
ggagcggccagaggaggag

SEQ ID NO: 15840 - RNA, 21 nt, synthetic construct
  misc_feature 1..21: note = Synthetic
  source 1..21: mol_type = other RNA
gaggagcggccagaggaggag

SEQ ID NO: 15841 - RNA, 22 nt, synthetic construct
  misc_feature 1..22: note = Synthetic
  source 1..22: mol_type = other RNA
cgaggagcggccagaggaggag

SEQ ID NO: 15842 - RNA, 23 nt, synthetic construct
  misc_feature 1..23: note = Synthetic
  source 1..23: mol_type = other RNA
acgaggagcggccagaggaggag

SEQ ID NO: 15843 - RNA, 24 nt, synthetic construct
  misc_feature 1..24: note = Synthetic
  source 1..24: mol_type = other RNA
gacgaggagcggccagaggaggag

SEQ ID NO: 15844 - RNA, 18 nt, synthetic construct
  misc_feature 1..18: note = Synthetic
  source 1..18: mol_type = other RNA
cgcatcaccgacccggag

SEQ ID NO: 15845 - RNA, 19 nt, synthetic construct
  misc_feature 1..19: note = Synthetic
  source 1..19: mol_type = other RNA
gcgcatcaccgacccggag

SEQ ID NO: 15846 - RNA, 21 nt, synthetic construct
  misc_feature 1..21: note = Synthetic
  source 1..21: mol_type = other RNA
cggcgcatcaccgacccggag

SEQ ID NO: 15847 - RNA, 22 nt, synthetic construct
  misc_feature 1..22: note = Synthetic
  source 1..22: mol_type = other RNA
tcggcgcatcaccgacccggag

SEQ ID NO: 15848 - RNA, 23 nt, synthetic construct
  misc_feature 1..23: note = Synthetic
  source 1..23: mol_type = other RNA
atcggcgcatcaccgacccggag

SEQ ID NO: 15849 - RNA, 24 nt, synthetic construct
  misc_feature 1..24: note = Synthetic
  source 1..24: mol_type = other RNA
catcggcgcatcaccgacccggag

SEQ ID NO: 15850 - RNA, 18 nt, synthetic construct
  misc_feature 1..18: note = Synthetic
  source 1..18: mol_type = other RNA
ggcgggggcgagcgggag

SEQ ID NO: 15851 - RNA, 19 nt, synthetic construct
  misc_feature 1..19: note = Synthetic
  source 1..19: mol_type = other RNA
gggcgggggcgagcgggag

SEQ ID NO: 15852 - RNA, 21 nt, synthetic construct
  misc_feature 1..21: note = Synthetic
  source 1..21: mol_type = other RNA
gagggcgggggcgagcgggag

SEQ ID NO: 15853 - RNA, 22 nt, synthetic construct
  misc_feature 1..22: note = Synthetic
  source 1..22: mol_type = other RNA
ggagggcgggggcgagcgggag

SEQ ID NO: 15854 - RNA, 23 nt, synthetic construct
  misc_feature 1..23: note = Synthetic
  source 1..23: mol_type = other RNA
aggagggcgggggcgagcgggag

SEQ ID NO: 15855 - RNA, 24 nt, synthetic construct
  misc_feature 1..24: note = Synthetic
  source 1..24: mol_type = other RNA
gaggagggcgggggcgagcgggag

SEQ ID NO: 15856 - RNA, 18 nt, synthetic construct
  misc_feature 1..18: note = Synthetic
  source 1..18: mol_type = other RNA
gcagtggcgcacctggag

SEQ ID NO: 15857 - RNA, 19 nt, synthetic construct
  misc_feature 1..19: note = Synthetic
  source 1..19: mol_type = other RNA
cgcagtggcgcacctggag

SEQ ID NO: 15858 - RNA, 21 nt, synthetic construct
  misc_feature 1..21: note = Synthetic
  source 1..21: mol_type = other RNA
gacgcagtggcgcacctggag

SEQ ID NO: 15859 - RNA, 22 nt, synthetic construct
  misc_feature 1..22: note = Synthetic
  source 1..22: mol_type = other RNA
cgacgcagtggcgcacctggag

SEQ ID NO: 15860 - RNA, 23 nt, synthetic construct
  misc_feature 1..23: note = Synthetic
  source 1..23: mol_type = other RNA
ccgacgcagtggcgcacctggag

SEQ ID NO: 15861 - RNA, 24 nt, synthetic construct
  misc_feature 1..24: note = Synthetic
  source 1..24: mol_type = other RNA
gccgacgcagtggcgcacctggag

SEQ ID NO: 15862 - RNA, 18 nt, synthetic construct
  misc_feature 1..18: note = Synthetic
  source 1..18: mol_type = other RNA
cccagacccgcgaggtag

SEQ ID NO: 15863 - RNA, 19 nt, synthetic construct
  misc_feature 1..19: note = Synthetic
  source 1..19: mol_type = other RNA
gcccagacccgcgaggtag

SEQ ID NO: 15864 - RNA, 21 nt, synthetic construct
  misc_feature 1..21: note = Synthetic
  source 1..21: mol_type = other RNA
tggcccagacccgcgaggtag

SEQ ID NO: 15865 - RNA, 22 nt, synthetic construct
  misc_feature 1..22: note = Synthetic
  source 1..22: mol_type = other RNA
gtggcccagacccgcgaggtag

SEQ ID NO: 15866 - RNA, 23 nt, synthetic construct
  misc_feature 1..23: note = Synthetic
  source 1..23: mol_type = other RNA
cgtggcccagacccgcgaggtag

SEQ ID NO: 15867 - RNA, 24 nt, synthetic construct
  misc_feature 1..24: note = Synthetic
  source 1..24: mol_type = other RNA
tcgtggcccagacccgcgaggtag

SEQ ID NO: 15868 - RNA, 18 nt, synthetic construct
  misc_feature 1..18: note = Synthetic
  source 1..18: mol_type = other RNA
gagcggccgccgcgttag

SEQ ID NO: 15869 - RNA, 19 nt, synthetic construct
  misc_feature 1..19: note = Synthetic
  source 1..19: mol_type = other RNA
ggagcggccgccgcgttag

SEQ ID NO: 15870 - RNA, 21 nt, synthetic construct
  misc_feature 1..21: note = Synthetic
  source 1..21: mol_type = other RNA
ccggagcggccgccgcgttag

SEQ ID NO: 15871 - RNA, 22 nt, synthetic construct
  misc_feature 1..22: note = Synthetic
  source 1..22: mol_type = other RNA
tccggagcggccgccgcgttag

SEQ ID NO: 15872 - RNA, 23 nt, synthetic construct
  misc_feature 1..23: note = Synthetic
  source 1..23: mol_type = other RNA
ctccggagcggccgccgcgttag

SEQ ID NO: 15873 - RNA, 24 nt, synthetic construct
  misc_feature 1..24: note = Synthetic
  source 1..24: mol_type = other RNA
tctccggagcggccgccgcgttag

SEQ ID NO: 15874 - RNA, 18 nt, synthetic construct
  misc_feature 1..18: note = Synthetic
  source 1..18: mol_type = other RNA
ccgcagcccgggaggacg

SEQ ID NO: 15875 - RNA, 19 nt, synthetic construct
  misc_feature 1..19: note = Synthetic
  source 1..19: mol_type = other RNA
gccgcagcccgggaggacg

SEQ ID NO: 15876 - RNA, 21 nt, synthetic construct
  misc_feature 1..21: note = Synthetic
  source 1..21: mol_type = other RNA
cggccgcagcccgggaggacg

SEQ ID NO: 15877 - RNA, 22 nt, synthetic construct
  misc_feature 1..22: note = Synthetic
  source 1..22: mol_type = other RNA
ccggccgcagcccgggaggacg

SEQ ID NO: 15878 - RNA, 23 nt, synthetic construct
  misc_feature 1..23: note = Synthetic
  source 1..23: mol_type = other RNA
tccggccgcagcccgggaggacg

SEQ ID NO: 15879 - RNA, 24 nt, synthetic construct
  misc_feature 1..24: note = Synthetic
  source 1..24: mol_type = other RNA
gtccggccgcagcccgggaggacg

SEQ ID NO: 15880 - RNA, 18 nt, synthetic construct
  misc_feature 1..18: note = Synthetic
  source 1..18: mol_type = other RNA
gtgggtgccggcgctacg

SEQ ID NO: 15881 - RNA, 19 nt, synthetic construct
  misc_feature 1..19: note = Synthetic
  source 1..19: mol_type = other RNA
ggtgggtgccggcgctacg

SEQ ID NO: 15882 - RNA, 21 nt, synthetic construct
  misc_feature 1..21: note = Synthetic
  source 1..21: mol_type = other RNA
gcggtgggtgccggcgctacg

SEQ ID NO: 15883 - RNA, 22 nt, synthetic construct
  misc_feature 1..22: note = Synthetic
  source 1..22: mol_type = other RNA
ggcggtgggtgccggcgctacg

SEQ ID NO: 15884 - RNA, 23 nt, synthetic construct
  misc_feature 1..23: note = Synthetic
  source 1..23: mol_type = other RNA
gggcggtgggtgccggcgctacg

SEQ ID NO: 15885 - RNA, 24 nt, synthetic construct
  misc_feature 1..24: note = Synthetic
  source 1..24: mol_type = other RNA
ggggcggtgggtgccggcgctacg

SEQ ID NO: 15886 - RNA, 18 nt, synthetic construct
  misc_feature 1..18: note = Synthetic
  source 1..18: mol_type = other RNA
gtcgagtttaactgtacg

SEQ ID NO: 15887 - RNA, 19 nt, synthetic construct
  misc_feature 1..19: note = Synthetic
  source 1..19: mol_type = other RNA
cgtcgagtttaactgtacg

SEQ ID NO: 15888 - RNA, 21 nt, synthetic construct
  misc_feature 1..21: note = Synthetic
  source 1..21: mol_type = other RNA
gacgtcgagtttaactgtacg

SEQ ID NO: 15889 - RNA, 22 nt, synthetic construct
  misc_feature 1..22: note = Synthetic
  source 1..22: mol_type = other RNA
cgacgtcgagtttaactgtacg

SEQ ID NO: 15890 - RNA, 23 nt, synthetic construct
  misc_feature 1..23: note = Synthetic
  source 1..23: mol_type = other RNA
gcgacgtcgagtttaactgtacg

SEQ ID NO: 15891 - RNA, 24 nt, synthetic construct
  misc_feature 1..24: note = Synthetic
  source 1..24: mol_type = other RNA
agcgacgtcgagtttaactgtacg

SEQ ID NO: 15892 - RNA, 18 nt, synthetic construct
  misc_feature 1..18: note = Synthetic
  source 1..18: mol_type = other RNA
atggacgccatcacaccg

SEQ ID NO: 15893 - RNA, 19 nt, synthetic construct
  misc_feature 1..19: note = Synthetic
  source 1..19: mol_type = other RNA
tatggacgccatcacaccg

SEQ ID NO: 15894 - RNA, 21 nt, synthetic construct
  misc_feature 1..21: note = Synthetic
  source 1..21: mol_type = other RNA
tttatggacgccatcacaccg

SEQ ID NO: 15895 - RNA, 22 nt, synthetic construct
  misc_feature 1..22: note = Synthetic
  source 1..22: mol_type = other RNA
gtttatggacgccatcacaccg

SEQ ID NO: 15896 - RNA, 23 nt, synthetic construct
  misc_feature 1..23: note = Synthetic
  source 1..23: mol_type = other RNA
ggtttatggacgccatcacaccg

SEQ ID NO: 15897 - RNA, 24 nt, synthetic construct
  misc_feature 1..24: note = Synthetic
  source 1..24: mol_type = other RNA
cggtttatggacgccatcacaccg

SEQ ID NO: 15898 - RNA, 18 nt, synthetic construct
  misc_feature 1..18: note = Synthetic
  source 1..18: mol_type = other RNA
aggactttgtcctcaccg

SEQ ID NO: 15899 - RNA, 19 nt, synthetic construct
  misc_feature 1..19: note = Synthetic
  source 1..19: mol_type = other RNA
caggactttgtcctcaccg

SEQ ID NO: 15900 - RNA, 21 nt, synthetic construct
  misc_feature 1..21: note = Synthetic
  source 1..21: mol_type = other RNA
tccaggactttgtcctcaccg

SEQ ID NO: 15901 - RNA, 22 nt, synthetic construct
  misc_feature 1..22: note = Synthetic
  source 1..22: mol_type = other RNA
atccaggactttgtcctcaccg

SEQ ID NO: 15902 - RNA, 23 nt, synthetic construct
  misc_feature 1..23: note = Synthetic
  source 1..23: mol_type = other RNA
catccaggactttgtcctcaccg

SEQ ID NO: 15903 - RNA, 24 nt, synthetic construct
  misc_feature 1..24: note = Synthetic
  source 1..24: mol_type = other RNA
acatccaggactttgtcctcaccg

SEQ ID NO: 15904 - RNA, 18 nt, synthetic construct
  misc_feature 1..18: note = Synthetic
  source 1..18: mol_type = other RNA
ccggtggccgggcacccg

SEQ ID NO: 15905 - RNA, 19 nt, synthetic construct
  misc_feature 1..19: note = Synthetic
  source 1..19: mol_type = other RNA
tccggtggccgggcacccg

SEQ ID NO: 15906 - RNA, 21 nt, synthetic construct
  misc_feature 1..21: note = Synthetic
  source 1..21: mol_type = other RNA
tttccggtggccgggcacccg

SEQ ID NO: 15907 - RNA, 22 nt, synthetic construct
  misc_feature 1..22: note = Synthetic
  source 1..22: mol_type = other RNA
ctttccggtggccgggcacccg

SEQ ID NO: 15908 - RNA, 23 nt, synthetic construct
  misc_feature 1..23: note = Synthetic
  source 1..23: mol_type = other RNA
cctttccggtggccgggcacccg

SEQ ID NO: 15909 - RNA, 24 nt, synthetic construct
  misc_feature 1..24: note = Synthetic
  source 1..24: mol_type = other RNA
gcctttccggtggccgggcacccg

SEQ ID NO: 15910 - RNA, 18 nt, synthetic construct
  misc_feature 1..18: note = Synthetic
  source 1..18: mol_type = other RNA
cggcgcatcaccgacccg

SEQ ID NO: 15911 - RNA, 19 nt, synthetic construct
  misc_feature 1..19: note = Synthetic
  source 1..19: mol_type = other RNA
tcggcgcatcaccgacccg

SEQ ID NO: 15912 - RNA, 21 nt, synthetic construct
  misc_feature 1..21: note = Synthetic
  source 1..21: mol_type = other RNA
catcggcgcatcaccgacccg

SEQ ID NO: 15913 - RNA, 22 nt, synthetic construct
  misc_feature 1..22: note = Synthetic
  source 1..22: mol_type = other RNA
ccatcggcgcatcaccgacccg

SEQ ID NO: 15914 - RNA, 23 nt, synthetic construct
  misc_feature 1..23: note = Synthetic
  source 1..23: mol_type = other RNA
cccatcggcgcatcaccgacccg

SEQ ID NO: 15915 - RNA, 24 nt, synthetic construct
  misc_feature 1..24: note = Synthetic
  source 1..24: mol_type = other RNA
gcccatcggcgcatcaccgacccg

SEQ ID NO: 15916 - RNA, 18 nt, synthetic construct
  misc_feature 1..18: note = Synthetic
  source 1..18: mol_type = other RNA
ttccccagagcagccccg

SEQ ID NO: 15917 - RNA, 19 nt, synthetic construct
  misc_feature 1..19: note = Synthetic
  source 1..19: mol_type = other RNA
attccccagagcagccccg

SEQ ID NO: 15918 - RNA, 21 nt, synthetic construct
  misc_feature 1..21: note = Synthetic
  source 1..21: mol_type = other RNA
ggattccccagagcagccccg

SEQ ID NO: 15919 - RNA, 22 nt, synthetic construct
  misc_feature 1..22: note = Synthetic
  source 1..22: mol_type = other RNA
cggattccccagagcagccccg

SEQ ID NO: 15920 - RNA, 23 nt, synthetic construct
  misc_feature 1..23: note = Synthetic
  source 1..23: mol_type = other RNA
gcggattccccagagcagccccg

SEQ ID NO: 15921 - RNA, 24 nt, synthetic construct
  misc_feature 1..24: note = Synthetic
  source 1..24: mol_type = other RNA
cgcggattccccagagcagccccg

SEQ ID NO: 15922 - RNA, 18 nt, synthetic construct
  misc_feature 1..18: note = Synthetic
  source 1..18: mol_type = other RNA
cgttagccgagcgccccg

SEQ ID NO: 15923 - RNA, 19 nt, synthetic construct
  misc_feature 1..19: note = Synthetic
  source 1..19: mol_type = other RNA
gcgttagccgagcgccccg

SEQ ID NO: 15924 - RNA, 21 nt, synthetic construct
  misc_feature 1..21: note = Synthetic
  source 1..21: mol_type = other RNA
ccgcgttagccgagcgccccg

SEQ ID NO: 15925 - RNA, 22 nt, synthetic construct
  misc_feature 1..22: note = Synthetic
  source 1..22: mol_type = other RNA
gccgcgttagccgagcgccccg

SEQ ID NO: 15926 - RNA, 23 nt, synthetic construct
  misc_feature 1..23: note = Synthetic
  source 1..23: mol_type = other RNA
cgccgcgttagccgagcgccccg

SEQ ID NO: 15927 - RNA, 24 nt, synthetic construct
  misc_feature 1..24: note = Synthetic
  source 1..24: mol_type = other RNA
ccgccgcgttagccgagcgccccg

SEQ ID NO: 15928 - RNA, 18 nt, synthetic construct
  misc_feature 1..18: note = Synthetic
  source 1..18: mol_type = other RNA
tggcgcgacccctgcccg

SEQ ID NO: 15929 - RNA, 19 nt, synthetic construct
  misc_feature 1..19: note = Synthetic
  source 1..19: mol_type = other RNA
ctggcgcgacccctgcccg

SEQ ID NO: 15930 - RNA, 21 nt, synthetic construct
  misc_feature 1..21: note = Synthetic
  source 1..21: mol_type = other RNA
ggctggcgcgacccctgcccg

SEQ ID NO: 15931 - RNA, 22 nt, synthetic construct
  misc_feature 1..22: note = Synthetic
  source 1..22: mol_type = other RNA
tggctggcgcgacccctgcccg

SEQ ID NO: 15932 - RNA, 23 nt, synthetic construct
  misc_feature 1..23: note = Synthetic
  source 1..23: mol_type = other RNA
gtggctggcgcgacccctgcccg

SEQ ID NO: 15933 - RNA, 24 nt, synthetic construct
  misc_feature 1..24: note = Synthetic
  source 1..24: mol_type = other RNA
agtggctggcgcgacccctgcccg

SEQ ID NO: 15934 - RNA, 18 nt, synthetic construct
  misc_feature 1..18: note = Synthetic
  source 1..18: mol_type = other RNA
gggggcgagcgggagccg

SEQ ID NO: 15935 - RNA, 19 nt, synthetic construct
  misc_feature 1..19: note = Synthetic
  source 1..19: mol_type = other RNA
cgggggcgagcgggagccg

SEQ ID NO: 15936 - RNA, 21 nt, synthetic construct
  misc_feature 1..21: note = Synthetic
  source 1..21: mol_type = other RNA
ggcgggggcgagcgggagccg

SEQ ID NO: 15937 - RNA, 22 nt, synthetic construct
  misc_feature 1..22: note = Synthetic
  source 1..22: mol_type = other RNA
gggcgggggcgagcgggagccg

SEQ ID NO: 15938 - RNA, 23 nt, synthetic construct
  misc_feature 1..23: note = Synthetic
  source 1..23: mol_type = other RNA
agggcgggggcgagcgggagccg

SEQ ID NO: 15939 - RNA, 24 nt, synthetic construct
  misc_feature 1..24: note = Synthetic
  source 1..24: mol_type = other RNA
gagggcgggggcgagcgggagccg

SEQ ID NO: 15940 - RNA, 18 nt, synthetic construct
  misc_feature 1..18: note = Synthetic
  source 1..18: mol_type = other RNA
tccccgcctactacgccg

SEQ ID NO: 15941 - RNA, 19 nt, synthetic construct
  misc_feature 1..19: note = Synthetic
  source 1..19: mol_type = other RNA
atccccgcctactacgccg

SEQ ID NO: 15942 - RNA, 21 nt, synthetic construct
  misc_feature 1..21: note = Synthetic
  source 1..21: mol_type = other RNA
acatccccgcctactacgccg

SEQ ID NO: 15943 - RNA, 22 nt, synthetic construct
  misc_feature 1..22: note = Synthetic
  source 1..22: mol_type = other RNA
gacatccccgcctactacgccg

SEQ ID NO: 15944 - RNA, 23 nt, synthetic construct
  misc_feature 1..23: note = Synthetic
  source 1..23: mol_type = other RNA
cgacatccccgcctactacgccg

SEQ ID NO: 15945 - RNA, 24 nt, synthetic construct
  misc_feature 1..24: note = Synthetic
  source 1..24: mol_type = other RNA
gcgacatccccgcctactacgccg

SEQ ID NO: 15946 - RNA, 18 nt, synthetic construct
  misc_feature 1..18: note = Synthetic
  source 1..18: mol_type = other RNA
ggcgatttaggggcgccg

SEQ ID NO: 15947 - RNA, 19 nt, synthetic construct
  misc_feature 1..19: note = Synthetic
  source 1..19: mol_type = other RNA
gggcgatttaggggcgccg

SEQ ID NO: 15948 - RNA, 21 nt, synthetic construct
  misc_feature 1..21: note = Synthetic
  source 1..21: mol_type = other RNA
aggggcgatttaggggcgccg

SEQ ID NO: 15949 - RNA, 22 nt, synthetic construct
  misc_feature 1..22: note = Synthetic
  source 1..22: mol_type = other RNA
caggggcgatttaggggcgccg

SEQ ID NO: 15950 - RNA, 23 nt, synthetic construct
  misc_feature 1..23: note = Synthetic
  source 1..23: mol_type = other RNA
ccaggggcgatttaggggcgccg

SEQ ID NO: 15951 - RNA, 24 nt, synthetic construct
  misc_feature 1..24: note = Synthetic
  source 1..24: mol_type = other RNA
cccaggggcgatttaggggcgccg

SEQ ID NO: 15952 - RNA, 18 nt, synthetic construct
  misc_feature 1..18: note = Synthetic
  source 1..18: mol_type = other RNA
gccgcggcctcacggccg

SEQ ID NO: 15953 - RNA, 19 nt, synthetic construct
  misc_feature 1..19: note = Synthetic
  source 1..19: mol_type = other RNA
tgccgcggcctcacggccg

SEQ ID NO: 15954 - RNA, 21 nt, synthetic construct
  misc_feature 1..21: note = Synthetic
  source 1..21: mol_type = other RNA
tgtgccgcggcctcacggccg

SEQ ID NO: 15955 - RNA, 22 nt, synthetic construct
  misc_feature 1..22: note = Synthetic
  source 1..22: mol_type = other RNA
ctgtgccgcggcctcacggccg

SEQ ID NO: 15956 - RNA, 23 nt, synthetic construct
  misc_feature 1..23: note = Synthetic
  source 1..23: mol_type = other RNA
gctgtgccgcggcctcacggccg

SEQ ID NO: 15957 - RNA, 24 nt, synthetic construct
  misc_feature 1..24: note = Synthetic
  source 1..24: mol_type = other RNA
tgctgtgccgcggcctcacggccg

SEQ ID NO: 15958 - RNA, 18 nt, synthetic construct
  misc_feature 1..18: note = Synthetic
  source 1..18: mol_type = other RNA
aggacgaggacgaacgcg

SEQ ID NO: 15959 - RNA, 19 nt, synthetic construct
  misc_feature 1..19: note = Synthetic
  source 1..19: mol_type = other RNA
gaggacgaggacgaacgcg

SEQ ID NO: 15960 - RNA, 21 nt, synthetic construct
  misc_feature 1..21: note = Synthetic
  source 1..21: mol_type = other RNA
gggaggacgaggacgaacgcg

SEQ ID NO: 15961 - RNA, 22 nt, synthetic construct
  misc_feature 1..22: note = Synthetic
  source 1..22: mol_type = other RNA
ggggaggacgaggacgaacgcg

SEQ ID NO: 15962 - RNA, 23 nt, synthetic construct
  misc_feature 1..23: note = Synthetic
  source 1..23: mol_type = other RNA
gggggaggacgaggacgaacgcg

SEQ ID NO: 15963 - RNA, 24 nt, synthetic construct
  misc_feature 1..24: note = Synthetic
  source 1..24: mol_type = other RNA
agggggaggacgaggacgaacgcg

SEQ ID NO: 15964 - RNA, 18 nt, synthetic construct
  misc_feature 1..18: note = Synthetic
  source 1..18: mol_type = other RNA
ttagccgagcgccccgcg

SEQ ID NO: 15965 - RNA, 19 nt, synthetic construct
  misc_feature 1..19: note = Synthetic
  source 1..19: mol_type = other RNA
gttagccgagcgccccgcg

SEQ ID NO: 15966 - RNA, 21 nt, synthetic construct
  misc_feature 1..21: note = Synthetic
  source 1..21: mol_type = other RNA
gcgttagccgagcgccccgcg

SEQ ID NO: 15967 - RNA, 22 nt, synthetic construct
  misc_feature 1..22: note = Synthetic
  source 1..22: mol_type = other RNA
cgcgttagccgagcgccccgcg

SEQ ID NO: 15968 - RNA, 23 nt, synthetic construct
  misc_feature 1..23: note = Synthetic
  source 1..23: mol_type = other RNA
ccgcgttagccgagcgccccgcg

SEQ ID NO: 15969 - RNA, 24 nt, synthetic construct
  misc_feature 1..24: note = Synthetic
  source 1..24: mol_type = other RNA
gccgcgttagccgagcgccccgcg

SEQ ID NO: 15970 - RNA, 18 nt, synthetic construct
  misc_feature 1..18: note = Synthetic
  source 1..18: mol_type = other RNA
cgagtacgtccacgcgcg

SEQ ID NO: 15971 - RNA, 19 nt, synthetic construct
  misc_feature 1..19: note = Synthetic
  source 1..19: mol_type = other RNA
gcgagtacgtccacgcgcg

SEQ ID NO: 15972 - RNA, 21 nt, synthetic construct
  misc_feature 1..21: note = Synthetic
  source 1..21: mol_type = other RNA
ccgcgagtacgtccacgcgcg

SEQ ID NO: 15973 - RNA, 22 nt, synthetic construct
  misc_feature 1..22: note = Synthetic
  source 1..22: mol_type = other RNA
cccgcgagtacgtccacgcgcg

SEQ ID NO: 15974 - RNA, 23 nt, synthetic construct
  misc_feature 1..23: note = Synthetic
  source 1..23: mol_type = other RNA
acccgcgagtacgtccacgcgcg

SEQ ID NO: 15975 - RNA, 24 nt, synthetic construct
  misc_feature 1..24: note = Synthetic
  source 1..24: mol_type = other RNA
gacccgcgagtacgtccacgcgcg

SEQ ID NO: 15976 - RNA, 18 nt, synthetic construct
  misc_feature 1..18: note = Synthetic
  source 1..18: mol_type = other RNA
cgggagccggagggcgcg

SEQ ID NO: 15977 - RNA, 19 nt, synthetic construct
  misc_feature 1..19: note = Synthetic
  source 1..19: mol_type = other RNA
gcgggagccggagggcgcg

SEQ ID NO: 15978 - RNA, 21 nt, synthetic construct
  misc_feature 1..21: note = Synthetic
  source 1..21: mol_type = other RNA
gagcgggagccggagggcgcg

SEQ ID NO: 15979 - RNA, 22 nt, synthetic construct
  misc_feature 1..22: note = Synthetic
  source 1..22: mol_type = other RNA
cgagcgggagccggagggcgcg

SEQ ID NO: 15980 - RNA, 23 nt, synthetic construct
  misc_feature 1..23: note = Synthetic
  source 1..23: mol_type = other RNA
gcgagcgggagccggagggcgcg

SEQ ID NO: 15981 - RNA, 24 nt, synthetic construct
  misc_feature 1..24: note = Synthetic
  source 1..24: mol_type = other RNA
ggcgagcgggagccggagggcgcg

SEQ ID NO: 15982 - RNA, 18 nt, synthetic construct
  misc_feature 1..18: note = Synthetic
  source 1..18: mol_type = other RNA
gatatcgaatgcaaggcg

SEQ ID NO: 15983 - RNA, 19 nt, synthetic construct
  misc_feature 1..19: note = Synthetic
  source 1..19: mol_type = other RNA
cgatatcgaatgcaaggcg

SEQ ID NO: 15984 - RNA, 21 nt, synthetic construct
  misc_feature 1..21: note = Synthetic
  source 1..21: mol_type = other RNA
ttcgatatcgaatgcaaggcg

SEQ ID NO: 15985 - RNA, 22 nt, synthetic construct
  misc_feature 1..22: note = Synthetic
  source 1..22: mol_type = other RNA
cttcgatatcgaatgcaaggcg

SEQ ID NO: 15986 - RNA, 23 nt, synthetic construct
  misc_feature 1..23: note = Synthetic
  source 1..23: mol_type = other RNA
gcttcgatatcgaatgcaaggcg

SEQ ID NO: 15987 - RNA, 24 nt, synthetic construct
  misc_feature 1..24: note = Synthetic
  source 1..24: mol_type = other RNA
tgcttcgatatcgaatgcaaggcg

SEQ ID NO: 15988 - RNA, 18 nt, synthetic construct
  misc_feature 1..18: note = Synthetic
  source 1..18: mol_type = other RNA
ggtgccggcgctacggcg

SEQ ID NO: 15989 - RNA, 19 nt, synthetic construct
  misc_feature 1..19: note = Synthetic
  source 1..19: mol_type = other RNA
gggtgccggcgctacggcg

SEQ ID NO: 15990 - RNA, 21 nt, synthetic construct
  misc_feature 1..21: note = Synthetic
  source 1..21: mol_type = other RNA
gtgggtgccggcgctacggcg

SEQ ID NO: 15991 - RNA, 22 nt, synthetic construct
  misc_feature 1..22: note = Synthetic
  source 1..22: mol_type = other RNA
ggtgggtgccggcgctacggcg

SEQ ID NO: 15992 - RNA, 23 nt, synthetic construct
  misc_feature 1..23: note = Synthetic
  source 1..23: mol_type = other RNA
cggtgggtgccggcgctacggcg

SEQ ID NO: 15993 - RNA, 24 nt, synthetic construct
  misc_feature 1..24: note = Synthetic
  source 1..24: mol_type = other RNA
gcggtgggtgccggcgctacggcg

SEQ ID NO: 15994 - RNA, 18 nt, synthetic construct
  misc_feature 1..18: note = Synthetic
  source 1..18: mol_type = other RNA
aggggcgatttaggggcg

SEQ ID NO: 15995 - RNA, 19 nt, synthetic construct
  misc_feature 1..19: note = Synthetic
  source 1..19: mol_type = other RNA
caggggcgatttaggggcg

SEQ ID NO: 15996 - RNA, 21 nt, synthetic construct
  misc_feature 1..21: note = Synthetic
  source 1..21: mol_type = other RNA
cccaggggcgatttaggggcg

SEQ ID NO: 15997 - RNA, 22 nt, synthetic construct
  misc_feature 1..22: note = Synthetic
  source 1..22: mol_type = other RNA
acccaggggcgatttaggggcg

SEQ ID NO: 15998 - RNA, 23 nt, synthetic construct
  misc_feature 1..23: note = Synthetic
  source 1..23: mol_type = other RNA
cacccaggggcgatttaggggcg

SEQ ID NO: 15999 - RNA, 24 nt, synthetic construct
  misc_feature 1..24: note = Synthetic
  source 1..24: mol_type = other RNA
acacccaggggcgatttaggggcg

SEQ ID NO: 16000 - RNA, 18 nt, synthetic construct
  misc_feature 1..18: note = Synthetic
  source 1..18: mol_type = other RNA
cggacaacctggccatcg

SEQ ID NO: 16001 - RNA, 19 nt, synthetic construct
  misc_feature 1..19: note = Synthetic
  source 1..19: mol_type = other RNA
gcggacaacctggccatcg

SEQ ID NO: 16002 - RNA, 21 nt, synthetic construct
  misc_feature 1..21: note = Synthetic
  source 1..21: mol_type = other RNA
cggcggacaacctggccatcg

SEQ ID NO: 16003 - RNA, 22 nt, synthetic construct
  misc_feature 1..22: note = Synthetic
  source 1..22: mol_type = other RNA
acggcggacaacctggccatcg

SEQ ID NO: 16004 - RNA, 23 nt, synthetic construct
  misc_feature 1..23: note = Synthetic
  source 1..23: mol_type = other RNA
tacggcggacaacctggccatcg

SEQ ID NO: 16005 - RNA, 24 nt, synthetic construct
  misc_feature 1..24: note = Synthetic
  source 1..24: mol_type = other RNA
gtacggcggacaacctggccatcg

SEQ ID NO: 16006 - RNA, 18 nt, synthetic construct
  misc_feature 1..18: note = Synthetic
  source 1..18: mol_type = other RNA
acttttacatgaacaagg

SEQ ID NO: 16007 - RNA, 19 nt, synthetic construct
  misc_feature 1..19: note = Synthetic
  source 1..19: mol_type = other RNA
tacttttacatgaacaagg

SEQ ID NO: 16008 - RNA, 21 nt, synthetic construct
  misc_feature 1..21: note = Synthetic
  source 1..21: mol_type = other RNA
agtacttttacatgaacaagg

SEQ ID NO: 16009 - RNA, 22 nt, synthetic construct
  misc_feature 1..22: note = Synthetic
  source 1..22: mol_type = other RNA
cagtacttttacatgaacaagg

SEQ ID NO: 16010 - RNA, 23 nt, synthetic construct
  misc_feature 1..23: note = Synthetic
  source 1..23: mol_type = other RNA
gcagtacttttacatgaacaagg

SEQ ID NO: 16011 - RNA, 24 nt, synthetic construct
  misc_feature 1..24: note = Synthetic
  source 1..24: mol_type = other RNA
ggcagtacttttacatgaacaagg

SEQ ID NO: 16012 - RNA, 18 nt, synthetic construct
  misc_feature 1..18: note = Synthetic
  source 1..18: mol_type = other RNA
tcgatatcgaatgcaagg

SEQ ID NO: 16013 - RNA, 19 nt, synthetic construct
  misc_feature 1..19: note = Synthetic
  source 1..19: mol_type = other RNA
ttcgatatcgaatgcaagg

SEQ ID NO: 16014 - RNA, 21 nt, synthetic construct
  misc_feature 1..21: note = Synthetic
  source 1..21: mol_type = other RNA
gcttcgatatcgaatgcaagg

SEQ ID NO: 16015 - RNA, 22 nt, synthetic construct
  misc_feature 1..22: note = Synthetic
  source 1..22: mol_type = other RNA
tgcttcgatatcgaatgcaagg

SEQ ID NO: 16016 - RNA, 23 nt, synthetic construct
  misc_feature 1..23: note = Synthetic
  source 1..23: mol_type = other RNA
gtgcttcgatatcgaatgcaagg

SEQ ID NO: 16017 - RNA, 24 nt, synthetic construct
  misc_feature 1..24: note = Synthetic
  source 1..24: mol_type = other RNA
tgtgcttcgatatcgaatgcaagg

SEQ ID NO: 16018 - RNA, 18 nt, synthetic construct
  misc_feature 1..18: note = Synthetic
  source 1..18: mol_type = other RNA
acgaggagcggccagagg

SEQ ID NO: 16019 - RNA, 19 nt, synthetic construct
  misc_feature 1..19: note = Synthetic
  source 1..19: mol_type = other RNA
gacgaggagcggccagagg

SEQ ID NO: 16020 - RNA, 21 nt, synthetic construct
  misc_feature 1..21: note = Synthetic
  source 1..21: mol_type = other RNA
aggacgaggagcggccagagg

SEQ ID NO: 16021 - RNA, 22 nt, synthetic construct
  misc_feature 1..22: note = Synthetic
  source 1..22: mol_type = other RNA
gaggacgaggagcggccagagg

SEQ ID NO: 16022 - RNA, 23 nt, synthetic construct
  misc_feature 1..23: note = Synthetic
  source 1..23: mol_type = other RNA
ggaggacgaggagcggccagagg

SEQ ID NO: 16023 - RNA, 24 nt, synthetic construct
  misc_feature 1..24: note = Synthetic
  source 1..24: mol_type = other RNA
gggaggacgaggagcggccagagg

SEQ ID NO: 16024 - RNA, 18 nt, synthetic construct
  misc_feature 1..18: note = Synthetic
  source 1..18: mol_type = other RNA
aggagggggaggacgagg

SEQ ID NO: 16025 - RNA, 19 nt, synthetic construct
  misc_feature 1..19: note = Synthetic
  source 1..19: mol_type = other RNA
gaggagggggaggacgagg

SEQ ID NO: 16026 - RNA, 21 nt, synthetic construct
  misc_feature 1..21: note = Synthetic
  source 1..21: mol_type = other RNA
aggaggagggggaggacgagg

SEQ ID NO: 16027 - RNA, 22 nt, synthetic construct
  misc_feature 1..22: note = Synthetic
  source 1..22: mol_type = other RNA
gaggaggagggggaggacgagg

SEQ ID NO: 16028 - RNA, 23 nt, synthetic construct
  misc_feature 1..23: note = Synthetic
  source 1..23: mol_type = other RNA
agaggaggagggggaggacgagg

SEQ ID NO: 16029 - RNA, 24 nt, synthetic construct
  misc_feature 1..24: note = Synthetic
  source 1..24: mol_type = other RNA
cagaggaggagggggaggacgagg

SEQ ID NO: 16030 - RNA, 18 nt, synthetic construct
  misc_feature 1..18: note = Synthetic
  source 1..18: mol_type = other RNA
ccatcaagaagtacgagg

SEQ ID NO: 16031 - RNA, 19 nt, synthetic construct
  misc_feature 1..19: note = Synthetic
  source 1..19: mol_type = other RNA
gccatcaagaagtacgagg

SEQ ID NO: 16032 - RNA, 21 nt, synthetic construct
  misc_feature 1..21: note = Synthetic
  source 1..21: mol_type = other RNA
cggccatcaagaagtacgagg

SEQ ID NO: 16033 - RNA, 22 nt, synthetic construct
  misc_feature 1..22: note = Synthetic
  source 1..22: mol_type = other RNA
ccggccatcaagaagtacgagg

SEQ ID NO: 16034 - RNA, 23 nt, synthetic construct
  misc_feature 1..23: note = Synthetic
  source 1..23: mol_type = other RNA
cccggccatcaagaagtacgagg

SEQ ID NO: 16035 - RNA, 24 nt, synthetic construct
  misc_feature 1..24: note = Synthetic
  source 1..24: mol_type = other RNA
gcccggccatcaagaagtacgagg

SEQ ID NO: 16036 - RNA, 18 nt, synthetic construct
  misc_feature 1..18: note = Synthetic
  source 1..18: mol_type = other RNA
tggcccagacccgcgagg

SEQ ID NO: 16037 - RNA, 19 nt, synthetic construct
  misc_feature 1..19: note = Synthetic
  source 1..19: mol_type = other RNA
gtggcccagacccgcgagg

SEQ ID NO: 16038 - RNA, 21 nt, synthetic construct
  misc_feature 1..21: note = Synthetic
  source 1..21: mol_type = other RNA
tcgtggcccagacccgcgagg

SEQ ID NO: 16039 - RNA, 22 nt, synthetic construct
  misc_feature 1..22: note = Synthetic
  source 1..22: mol_type = other RNA
atcgtggcccagacccgcgagg

SEQ ID NO: 16040 - RNA, 23 nt, synthetic construct
  misc_feature 1..23: note = Synthetic
  source 1..23: mol_type = other RNA
gatcgtggcccagacccgcgagg

SEQ ID NO: 16041 - RNA, 24 nt, synthetic construct
  misc_feature 1..24: note = Synthetic
  source 1..24: mol_type = other RNA
tgatcgtggcccagacccgcgagg

SEQ ID NO: 16042 - RNA, 18 nt, synthetic construct
  misc_feature 1..18: note = Synthetic
  source 1..18: mol_type = other RNA
actacctggagatcgagg

SEQ ID NO: 16043 - RNA, 19 nt, synthetic construct
  misc_feature 1..19: note = Synthetic
  source 1..19: mol_type = other RNA
gactacctggagatcgagg

SEQ ID NO: 16044 - RNA, 21 nt, synthetic construct
  misc_feature 1..21: note = Synthetic
  source 1..21: mol_type = other RNA
aggactacctggagatcgagg

SEQ ID NO: 16045 - RNA, 22 nt, synthetic construct
  misc_feature 1..22: note = Synthetic
  source 1..22: mol_type = other RNA
aaggactacctggagatcgagg

SEQ ID NO: 16046 - RNA, 23 nt, synthetic construct
  misc_feature 1..23: note = Synthetic
  source 1..23: mol_type = other RNA
caaggactacctggagatcgagg

SEQ ID NO: 16047 - RNA, 24 nt, synthetic construct
  misc_feature 1..24: note = Synthetic
  source 1..24: mol_type = other RNA
gcaaggactacctggagatcgagg

SEQ ID NO: 16048 - RNA, 18 nt, synthetic construct
  misc_feature 1..18: note = Synthetic
  source 1..18: mol_type = other RNA
ccgcggaccacttcgagg

SEQ ID NO: 16049 - RNA, 19 nt, synthetic construct
  misc_feature 1..19: note = Synthetic
  source 1..19: mol_type = other RNA
tccgcggaccacttcgagg

SEQ ID NO: 16050 - RNA, 21 nt, synthetic construct
  misc_feature 1..21: note = Synthetic
  source 1..21: mol_type = other RNA
tctccgcggaccacttcgagg

SEQ ID NO: 16051 - RNA, 22 nt, synthetic construct
  misc_feature 1..22: note = Synthetic
  source 1..22: mol_type = other RNA
atctccgcggaccacttcgagg

SEQ ID NO: 16052 - RNA, 23 nt, synthetic construct
  misc_feature 1..23: note = Synthetic
  source 1..23: mol_type = other RNA
catctccgcggaccacttcgagg

SEQ ID NO: 16053 - RNA, 24 nt, synthetic construct
  misc_feature 1..24: note = Synthetic
  source 1..24: mol_type = other RNA
gcatctccgcggaccacttcgagg

SEQ ID NO: 16054 - RNA, 18 nt, synthetic construct
  misc_feature 1..18: note = Synthetic
  source 1..18: mol_type = other RNA
aggagcggccagaggagg

SEQ ID NO: 16055 - RNA, 19 nt, synthetic construct
  misc_feature 1..19: note = Synthetic
  source 1..19: mol_type = other RNA
gaggagcggccagaggagg

SEQ ID NO: 16056 - RNA, 21 nt, synthetic construct
  misc_feature 1..21: note = Synthetic
  source 1..21: mol_type = other RNA
acgaggagcggccagaggagg

SEQ ID NO: 16057 - RNA, 22 nt, synthetic construct
  misc_feature 1..22: note = Synthetic
  source 1..22: mol_type = other RNA
gacgaggagcggccagaggagg

SEQ ID NO: 16058 - RNA, 23 nt, synthetic construct
  misc_feature 1..23: note = Synthetic
  source 1..23: mol_type = other RNA
ggacgaggagcggccagaggagg

SEQ ID NO: 16059 - RNA, 24 nt, synthetic construct
  misc_feature 1..24: note = Synthetic
  source 1..24: mol_type = other RNA
aggacgaggagcggccagaggagg

SEQ ID NO: 16060 - RNA, 18 nt, synthetic construct
  misc_feature 1..18: note = Synthetic
  source 1..18: mol_type = other RNA
aggacgaacgcgaggagg

SEQ ID NO: 16061 - RNA, 19 nt, synthetic construct
  misc_feature 1..19: note = Synthetic
  source 1..19: mol_type = other RNA
gaggacgaacgcgaggagg

SEQ ID NO: 16062 - RNA, 21 nt, synthetic construct
  misc_feature 1..21: note = Synthetic
  source 1..21: mol_type = other RNA
acgaggacgaacgcgaggagg

SEQ ID NO: 16063 - RNA, 22 nt, synthetic construct
  misc_feature 1..22: note = Synthetic
  source 1..22: mol_type = other RNA
gacgaggacgaacgcgaggagg

SEQ ID NO: 16064 - RNA, 23 nt, synthetic construct
  misc_feature 1..23: note = Synthetic
  source 1..23: mol_type = other RNA
ggacgaggacgaacgcgaggagg

SEQ ID NO: 16065 - RNA, 24 nt, synthetic construct
  misc_feature 1..24: note = Synthetic
  source 1..24: mol_type = other RNA
aggacgaggacgaacgcgaggagg

SEQ ID NO: 16066 - RNA, 18 nt, synthetic construct
  misc_feature 1..18: note = Synthetic
  source 1..18: mol_type = other RNA
agcggccagaggaggagg

SEQ ID NO: 16067 - RNA, 19 nt, synthetic construct
  misc_feature 1..19: note = Synthetic
  source 1..19: mol_type = other RNA
gagcggccagaggaggagg

SEQ ID NO: 16068 - RNA, 21 nt, synthetic construct
  misc_feature 1..21: note = Synthetic
  source 1..21: mol_type = other RNA
aggagcggccagaggaggagg

SEQ ID NO: 16069 - RNA, 22 nt, synthetic construct
  misc_feature 1..22: note = Synthetic
  source 1..22: mol_type = other RNA
gaggagcggccagaggaggagg

SEQ ID NO: 16070 - RNA, 23 nt, synthetic construct
  misc_feature 1..23: note = Synthetic
  source 1..23: mol_type = other RNA
cgaggagcggccagaggaggagg

SEQ ID NO: 16071 - RNA, 24 nt, synthetic construct
  misc_feature 1..24: note = Synthetic
  source 1..24: mol_type = other RNA
acgaggagcggccagaggaggagg

SEQ ID NO: 16072 - RNA, 18 nt, synthetic construct
  misc_feature 1..18: note = Synthetic
  source 1..18: mol_type = other RNA
cggccgcagcccgggagg

SEQ ID NO: 16073 - RNA, 19 nt, synthetic construct
  misc_feature 1..19: note = Synthetic
  source 1..19: mol_type = other RNA
ccggccgcagcccgggagg

SEQ ID NO: 16074 - RNA, 21 nt, synthetic construct
  misc_feature 1..21: note = Synthetic
  source 1..21: mol_type = other RNA
gtccggccgcagcccgggagg

SEQ ID NO: 16075 - RNA, 22 nt, synthetic construct
  misc_feature 1..22: note = Synthetic
  source 1..22: mol_type = other RNA
cgtccggccgcagcccgggagg

SEQ ID NO: 16076 - RNA, 23 nt, synthetic construct
  misc_feature 1..23: note = Synthetic
  source 1..23: mol_type = other RNA
gcgtccggccgcagcccgggagg

SEQ ID NO: 16077 - RNA, 24 nt, synthetic construct
  misc_feature 1..24: note = Synthetic
  source 1..24: mol_type = other RNA
agcgtccggccgcagcccgggagg

SEQ ID NO: 16078 - RNA, 18 nt, synthetic construct
  misc_feature 1..18: note = Synthetic
  source 1..18: mol_type = other RNA
cagaggaggagggggagg

SEQ ID NO: 16079 - RNA, 19 nt, synthetic construct
  misc_feature 1..19: note = Synthetic
  source 1..19: mol_type = other RNA
ccagaggaggagggggagg

SEQ ID NO: 16080 - RNA, 21 nt, synthetic construct
  misc_feature 1..21: note = Synthetic
  source 1..21: mol_type = other RNA
ggccagaggaggagggggagg

SEQ ID NO: 16081 - RNA, 22 nt, synthetic construct
  misc_feature 1..22: note = Synthetic
  source 1..22: mol_type = other RNA
cggccagaggaggagggggagg

SEQ ID NO: 16082 - RNA, 23 nt, synthetic construct
  misc_feature 1..23: note = Synthetic
  source 1..23: mol_type = other RNA
gcggccagaggaggagggggagg

SEQ ID NO: 16083 - RNA, 24 nt, synthetic construct
  misc_feature 1..24: note = Synthetic
  source 1..24: mol_type = other RNA
agcggccagaggaggagggggagg

SEQ ID NO: 16084 - RNA, 18 nt, synthetic construct
  misc_feature 1..18: note = Synthetic
  source 1..18: mol_type = other RNA
gcaaggcggggggggagg

SEQ ID NO: 16085 - RNA, 19 nt, synthetic construct
  misc_feature 1..19: note = Synthetic
  source 1..19: mol_type = other RNA
tgcaaggcggggggggagg

SEQ ID NO: 16086 - RNA, 21 nt, synthetic construct
  misc_feature 1..21: note = Synthetic
  source 1..21: mol_type = other RNA
aatgcaaggcggggggggagg

SEQ ID NO: 16087 - RNA, 22 nt, synthetic construct
  misc_feature 1..22: note = Synthetic
  source 1..22: mol_type = other RNA
gaatgcaaggcggggggggagg

SEQ ID NO: 16088 - RNA, 23 nt, synthetic construct
  misc_feature 1..23: note = Synthetic
  source 1..23: mol_type = other RNA
cgaatgcaaggcggggggggagg

SEQ ID NO: 16089 - RNA, 24 nt, synthetic construct
  misc_feature 1..24: note = Synthetic
  source 1..24: mol_type = other RNA
tcgaatgcaaggcggggggggagg

SEQ ID NO: 16090 - RNA, 18 nt, synthetic construct
  misc_feature 1..18: note = Synthetic
  source 1..18: mol_type = other RNA
gtacggccgcatgaacgg

SEQ ID NO: 16091 - RNA, 19 nt, synthetic construct
  misc_feature 1..19: note = Synthetic
  source 1..19: mol_type = other RNA
ggtacggccgcatgaacgg

SEQ ID NO: 16092 - RNA, 21 nt, synthetic construct
  misc_feature 1..21: note = Synthetic
  source 1..21: mol_type = other RNA
cgggtacggccgcatgaacgg

SEQ ID NO: 16093 - RNA, 22 nt, synthetic construct
  misc_feature 1..22: note = Synthetic
  source 1..22: mol_type = other RNA
acgggtacggccgcatgaacgg

SEQ ID NO: 16094 - RNA, 23 nt, synthetic construct
  misc_feature 1..23: note = Synthetic
  source 1..23: mol_type = other RNA
gacgggtacggccgcatgaacgg

SEQ ID NO: 16095 - RNA, 24 nt, synthetic construct
  misc_feature 1..24: note = Synthetic
  source 1..24: mol_type = other RNA
ggacgggtacggccgcatgaacgg

SEQ ID NO: 16096 - RNA, 18 nt, synthetic construct
  misc_feature 1..18: note = Synthetic
  source 1..18: mol_type = other RNA
tgggtgccggcgctacgg

SEQ ID NO: 16097 - RNA, 19 nt, synthetic construct
  misc_feature 1..19: note = Synthetic
  source 1..19: mol_type = other RNA
gtgggtgccggcgctacgg

SEQ ID NO: 16098 - RNA, 21 nt, synthetic construct
  misc_feature 1..21: note = Synthetic
  source 1..21: mol_type = other RNA
cggtgggtgccggcgctacgg

SEQ ID NO: 16099 - RNA, 22 nt, synthetic construct
  misc_feature 1..22: note = Synthetic
  source 1..22: mol_type = other RNA
gcggtgggtgccggcgctacgg

SEQ ID NO: 16100 - RNA, 23 nt, synthetic construct
  misc_feature 1..23: note = Synthetic
  source 1..23: mol_type = other RNA
ggcggtgggtgccggcgctacgg

SEQ ID NO: 16101 - RNA, 24 nt, synthetic construct
  misc_feature 1..24: note = Synthetic
  source 1..24: mol_type = other RNA
gggcggtgggtgccggcgctacgg

SEQ ID NO: 16102 - RNA, 18 nt, synthetic construct
  misc_feature 1..18: note = Synthetic
  source 1..18: mol_type = other RNA
cgtccggccgcagcccgg

SEQ ID NO: 16103 - RNA, 19 nt, synthetic construct
  misc_feature 1..19: note = Synthetic
  source 1..19: mol_type = other RNA
gcgtccggccgcagcccgg

SEQ ID NO: 16104 - RNA, 21 nt, synthetic construct
  misc_feature 1..21: note = Synthetic
  source 1..21: mol_type = other RNA
aagcgtccggccgcagcccgg

SEQ ID NO: 16105 - RNA, 22 nt, synthetic construct
  misc_feature 1..22: note = Synthetic
  source 1..22: mol_type = other RNA
caagcgtccggccgcagcccgg

SEQ ID NO: 16106 - RNA, 23 nt, synthetic construct
  misc_feature 1..23: note = Synthetic
  source 1..23: mol_type = other RNA
ccaagcgtccggccgcagcccgg

SEQ ID NO: 16107 - RNA, 24 nt, synthetic construct
  misc_feature 1..24: note = Synthetic
  source 1..24: mol_type = other RNA
cccaagcgtccggccgcagcccgg

SEQ ID NO: 16108 - RNA, 18 nt, synthetic construct
  misc_feature 1..18: note = Synthetic
  source 1..18: mol_type = other RNA
gcgatttaggggcgccgg

SEQ ID NO: 16109 - RNA, 19 nt, synthetic construct
  misc_feature 1..19: note = Synthetic
  source 1..19: mol_type = other RNA
ggcgatttaggggcgccgg

SEQ ID NO: 16110 - RNA, 21 nt, synthetic construct
  misc_feature 1..21: note = Synthetic
  source 1..21: mol_type = other RNA
ggggcgatttaggggcgccgg

SEQ ID NO: 16111 - RNA, 22 nt, synthetic construct
  misc_feature 1..22: note = Synthetic
  source 1..22: mol_type = other RNA
aggggcgatttaggggcgccgg

SEQ ID NO: 16112 - RNA, 23 nt, synthetic construct
  misc_feature 1..23: note = Synthetic
  source 1..23: mol_type = other RNA
caggggcgatttaggggcgccgg

SEQ ID NO: 16113 - RNA, 24 nt, synthetic construct
  misc_feature 1..24: note = Synthetic
  source 1..24: mol_type = other RNA
ccaggggcgatttaggggcgccgg

SEQ ID NO: 16114 - RNA, 18 nt, synthetic construct
  misc_feature 1..18: note = Synthetic
  source 1..18: mol_type = other RNA
atatcgaatgcaaggcgg

SEQ ID NO: 16115 - RNA, 19 nt, synthetic construct
  misc_feature 1..19: note = Synthetic
  source 1..19: mol_type = other RNA
gatatcgaatgcaaggcgg

SEQ ID NO: 16116 - RNA, 21 nt, synthetic construct
  misc_feature 1..21: note = Synthetic
  source 1..21: mol_type = other RNA
tcgatatcgaatgcaaggcgg

SEQ ID NO: 16117 - RNA, 22 nt, synthetic construct
  misc_feature 1..22: note = Synthetic
  source 1..22: mol_type = other RNA
ttcgatatcgaatgcaaggcgg

SEQ ID NO: 16118 - RNA, 23 nt, synthetic construct
  misc_feature 1..23: note = Synthetic
  source 1..23: mol_type = other RNA
cttcgatatcgaatgcaaggcgg

SEQ ID NO: 16119 - RNA, 24 nt, synthetic construct
  misc_feature 1..24: note = Synthetic
  source 1..24: mol_type = other RNA
gcttcgatatcgaatgcaaggcgg

SEQ ID NO: 16120 - RNA, 18 nt, synthetic construct
  misc_feature 1..18: note = Synthetic
  source 1..18: mol_type = other RNA
gtgccggcgctacggcgg

SEQ ID NO: 16121 - RNA, 19 nt, synthetic construct
  misc_feature 1..19: note = Synthetic
  source 1..19: mol_type = other RNA
ggtgccggcgctacggcgg

SEQ ID NO: 16122 - RNA, 21 nt, synthetic construct
  misc_feature 1..21: note = Synthetic
  source 1..21: mol_type = other RNA
tgggtgccggcgctacggcgg

SEQ ID NO: 16123 - RNA, 22 nt, synthetic construct
  misc_feature 1..22: note = Synthetic
  source 1..22: mol_type = other RNA
gtgggtgccggcgctacggcgg

SEQ ID NO: 16124 - RNA, 23 nt, synthetic construct
  misc_feature 1..23: note = Synthetic
  source 1..23: mol_type = other RNA
ggtgggtgccggcgctacggcgg

SEQ ID NO: 16125 - RNA, 24 nt, synthetic construct
  misc_feature 1..24: note = Synthetic
  source 1..24: mol_type = other RNA
cggtgggtgccggcgctacggcgg

SEQ ID NO: 16126 - RNA, 18 nt, synthetic construct
  misc_feature 1..18: note = Synthetic
  source 1..18: mol_type = other RNA
ggacgaacgcgaggaggg

SEQ ID NO: 16127 - RNA, 19 nt, synthetic construct
  misc_feature 1..19: note = Synthetic
  source 1..19: mol_type = other RNA
aggacgaacgcgaggaggg

SEQ ID NO: 16128 - RNA, 21 nt, synthetic construct
  misc_feature 1..21: note = Synthetic
  source 1..21: mol_type = other RNA
cgaggacgaacgcgaggaggg

SEQ ID NO: 16129 - RNA, 22 nt, synthetic construct
  misc_feature 1..22: note = Synthetic
  source 1..22: mol_type = other RNA
acgaggacgaacgcgaggaggg

SEQ ID NO: 16130 - RNA, 23 nt, synthetic construct
  misc_feature 1..23: note = Synthetic
  source 1..23: mol_type = other RNA
gacgaggacgaacgcgaggaggg

SEQ ID NO: 16131 - RNA, 24 nt, synthetic construct
  misc_feature 1..24: note = Synthetic
  source 1..24: mol_type = other RNA
ggacgaggacgaacgcgaggaggg

SEQ ID NO: 16132 - RNA, 18 nt, synthetic construct
  misc_feature 1..18: note = Synthetic
  source 1..18: mol_type = other RNA
gtaccgtctcaaaccggg

SEQ ID NO: 16133 - RNA, 19 nt, synthetic construct
  misc_feature 1..19: note = Synthetic
  source 1..19: mol_type = other RNA
ggtaccgtctcaaaccggg

SEQ ID NO: 16134 - RNA, 21 nt, synthetic construct
  misc_feature 1..21: note = Synthetic
  source 1..21: mol_type = other RNA
ctggtaccgtctcaaaccggg

SEQ ID NO: 16135 - RNA, 22 nt, synthetic construct
  misc_feature 1..22: note = Synthetic
  source 1..22: mol_type = other RNA
gctggtaccgtctcaaaccggg

SEQ ID NO: 16136 - RNA, 23 nt, synthetic construct
  misc_feature 1..23: note = Synthetic
  source 1..23: mol_type = other RNA
ggctggtaccgtctcaaaccggg

SEQ ID NO: 16137 - RNA, 24 nt, synthetic construct
  misc_feature 1..24: note = Synthetic
  source 1..24: mol_type = other RNA
cggctggtaccgtctcaaaccggg

SEQ ID NO: 16138 - RNA, 18 nt, synthetic construct
  misc_feature 1..18: note = Synthetic
  source 1..18: mol_type = other RNA
cgatttaggggcgccggg

SEQ ID NO: 16139 - RNA, 19 nt, synthetic construct
  misc_feature 1..19: note = Synthetic
  source 1..19: mol_type = other RNA
gcgatttaggggcgccggg

SEQ ID NO: 16140 - RNA, 21 nt, synthetic construct
  misc_feature 1..21: note = Synthetic
  source 1..21: mol_type = other RNA
gggcgatttaggggcgccggg

SEQ ID NO: 16141 - RNA, 22 nt, synthetic construct
  misc_feature 1..22: note = Synthetic
  source 1..22: mol_type = other RNA
ggggcgatttaggggcgccggg

SEQ ID NO: 16142 - RNA, 23 nt, synthetic construct
  misc_feature 1..23: note = Synthetic
  source 1..23: mol_type = other RNA
aggggcgatttaggggcgccggg

SEQ ID NO: 16143 - RNA, 24 nt, synthetic construct
  misc_feature 1..24: note = Synthetic
  source 1..24: mol_type = other RNA
caggggcgatttaggggcgccggg

SEQ ID NO: 16144 - RNA, 18 nt, synthetic construct
  misc_feature 1..18: note = Synthetic
  source 1..18: mol_type = other RNA
tatcgaatgcaaggcggg

SEQ ID NO: 16145 - RNA, 19 nt, synthetic construct
  misc_feature 1..19: note = Synthetic
  source 1..19: mol_type = other RNA
atatcgaatgcaaggcggg

SEQ ID NO: 16146 - RNA, 21 nt, synthetic construct
  misc_feature 1..21: note = Synthetic
  source 1..21: mol_type = other RNA
cgatatcgaatgcaaggcggg

SEQ ID NO: 16147 - RNA, 22 nt, synthetic construct
  misc_feature 1..22: note = Synthetic
  source 1..22: mol_type = other RNA
tcgatatcgaatgcaaggcggg

SEQ ID NO: 16148 - RNA, 23 nt, synthetic construct
  misc_feature 1..23: note = Synthetic
  source 1..23: mol_type = other RNA
ttcgatatcgaatgcaaggcggg

SEQ ID NO: 16149 - RNA, 24 nt, synthetic construct
  misc_feature 1..24: note = Synthetic
  source 1..24: mol_type = other RNA
cttcgatatcgaatgcaaggcggg

SEQ ID NO: 16150 - RNA, 18 nt, synthetic construct
  misc_feature 1..18: note = Synthetic
  source 1..18: mol_type = other RNA
acgccgccgccccagggg

SEQ ID NO: 16151 - RNA, 19 nt, synthetic construct
  misc_feature 1..19: note = Synthetic
  source 1..19: mol_type = other RNA
gacgccgccgccccagggg

SEQ ID NO: 16152 - RNA, 21 nt, synthetic construct
  misc_feature 1..21: note = Synthetic
  source 1..21: mol_type = other RNA
tagacgccgccgccccagggg

SEQ ID NO: 16153 - RNA, 22 nt, synthetic construct
  misc_feature 1..22: note = Synthetic
  source 1..22: mol_type = other RNA
ctagacgccgccgccccagggg

SEQ ID NO: 16154 - RNA, 23 nt, synthetic construct
  misc_feature 1..23: note = Synthetic
  source 1..23: mol_type = other RNA
gctagacgccgccgccccagggg

SEQ ID NO: 16155 - RNA, 24 nt, synthetic construct
  misc_feature 1..24: note = Synthetic
  source 1..24: mol_type = other RNA
agctagacgccgccgccccagggg

SEQ ID NO: 16156 - RNA, 18 nt, synthetic construct
  misc_feature 1..18: note = Synthetic
  source 1..18: mol_type = other RNA
cggccagaggaggagggg

SEQ ID NO: 16157 - RNA, 19 nt, synthetic construct
  misc_feature 1..19: note = Synthetic
  source 1..19: mol_type = other RNA
gcggccagaggaggagggg

SEQ ID NO: 16158 - RNA, 21 nt, synthetic construct
  misc_feature 1..21: note = Synthetic
  source 1..21: mol_type = other RNA
gagcggccagaggaggagggg

SEQ ID NO: 16159 - RNA, 22 nt, synthetic construct
  misc_feature 1..22: note = Synthetic
  source 1..22: mol_type = other RNA
ggagcggccagaggaggagggg

SEQ ID NO: 16160 - RNA, 23 nt, synthetic construct
  misc_feature 1..23: note = Synthetic
  source 1..23: mol_type = other RNA
aggagcggccagaggaggagggg

SEQ ID NO: 16161 - RNA, 24 nt, synthetic construct
  misc_feature 1..24: note = Synthetic
  source 1..24: mol_type = other RNA
gaggagcggccagaggaggagggg

SEQ ID NO: 16162 - RNA, 18 nt, synthetic construct
  misc_feature 1..18: note = Synthetic
  source 1..18: mol_type = other RNA
gatttaggggcgccgggg

SEQ ID NO: 16163 - RNA, 19 nt, synthetic construct
  misc_feature 1..19: note = Synthetic
  source 1..19: mol_type = other RNA
cgatttaggggcgccgggg

SEQ ID NO: 16164 - RNA, 21 nt, synthetic construct
  misc_feature 1..21: note = Synthetic
  source 1..21: mol_type = other RNA
ggcgatttaggggcgccgggg

SEQ ID NO: 16165 - RNA, 22 nt, synthetic construct
  misc_feature 1..22: note = Synthetic
  source 1..22: mol_type = other RNA
gggcgatttaggggcgccgggg

SEQ ID NO: 16166 - RNA, 23 nt, synthetic construct
  misc_feature 1..23: note = Synthetic
  source 1..23: mol_type = other RNA
ggggcgatttaggggcgccgggg

SEQ ID NO: 16167 - RNA, 24 nt, synthetic construct
  misc_feature 1..24: note = Synthetic
  source 1..24: mol_type = other RNA
aggggcgatttaggggcgccgggg

SEQ ID NO: 16168 - RNA, 18 nt, synthetic construct
  misc_feature 1..18: note = Synthetic
  source 1..18: mol_type = other RNA
atcgaatgcaaggcgggg

SEQ ID NO: 16169 - RNA, 19 nt, synthetic construct
  misc_feature 1..19: note = Synthetic
  source 1..19: mol_type = other RNA
tatcgaatgcaaggcgggg

SEQ ID NO: 16170 - RNA, 21 nt, synthetic construct
  misc_feature 1..21: note = Synthetic
  source 1..21: mol_type = other RNA
gatatcgaatgcaaggcgggg

SEQ ID NO: 16171 - RNA, 22 nt, synthetic construct
  misc_feature 1..22: note = Synthetic
  source 1..22: mol_type = other RNA
cgatatcgaatgcaaggcgggg

SEQ ID NO: 16172 - RNA, 23 nt, synthetic construct
  misc_feature 1..23: note = Synthetic
  source 1..23: mol_type = other RNA
tcgatatcgaatgcaaggcgggg

SEQ ID NO: 16173 - RNA, 24 nt, synthetic construct
  misc_feature 1..24: note = Synthetic
  source 1..24: mol_type = other RNA
ttcgatatcgaatgcaaggcgggg

SEQ ID NO: 16174 - RNA, 18 nt, synthetic construct
  misc_feature 1..18: note = Synthetic
  source 1..18: mol_type = other RNA
aacgcgaggagggcgggg

SEQ ID NO: 16175 - RNA, 19 nt, synthetic construct
  misc_feature 1..19: note = Synthetic
  source 1..19: mol_type = other RNA
gaacgcgaggagggcgggg

SEQ ID NO: 16176 - RNA, 21 nt, synthetic construct
  misc_feature 1..21: note = Synthetic
  source 1..21: mol_type = other RNA
acgaacgcgaggagggcgggg

SEQ ID NO: 16177 - RNA, 22 nt, synthetic construct
  misc_feature 1..22: note = Synthetic
  source 1..22: mol_type = other RNA
gacgaacgcgaggagggcgggg

SEQ ID NO: 16178 - RNA, 23 nt, synthetic construct
  misc_feature 1..23: note = Synthetic
  source 1..23: mol_type = other RNA
ggacgaacgcgaggagggcgggg

SEQ ID NO: 16179 - RNA, 24 nt, synthetic construct
  misc_feature 1..24: note = Synthetic
  source 1..24: mol_type = other RNA
aggacgaacgcgaggagggcgggg

SEQ ID NO: 16180 - RNA, 18 nt, synthetic construct
  misc_feature 1..18: note = Synthetic
  source 1..18: mol_type = other RNA
tcgaatgcaaggcggggg

SEQ ID NO: 16181 - RNA, 19 nt, synthetic construct
  misc_feature 1..19: note = Synthetic
  source 1..19: mol_type = other RNA
atcgaatgcaaggcggggg

SEQ ID NO: 16182 - RNA, 21 nt, synthetic construct
  misc_feature 1..21: note = Synthetic
  source 1..21: mol_type = other RNA
atatcgaatgcaaggcggggg

SEQ ID NO: 16183 - RNA, 22 nt, synthetic construct
  misc_feature 1..22: note = Synthetic
  source 1..22: mol_type = other RNA
gatatcgaatgcaaggcggggg

SEQ ID NO: 16184 - RNA, 23 nt, synthetic construct
  misc_feature 1..23: note = Synthetic
  source 1..23: mol_type = other RNA
cgatatcgaatgcaaggcggggg

SEQ ID NO: 16185 - RNA, 24 nt, synthetic construct
  misc_feature 1..24: note = Synthetic
  source 1..24: mol_type = other RNA
tcgatatcgaatgcaaggcggggg

SEQ ID NO: 16186 - RNA, 18 nt, synthetic construct
  misc_feature 1..18: note = Synthetic
  source 1..18: mol_type = other RNA
gaatgcaaggcggggggg

SEQ ID NO: 16187 - RNA, 19 nt, synthetic construct
  misc_feature 1..19: note = Synthetic
  source 1..19: mol_type = other RNA
cgaatgcaaggcggggggg

SEQ ID NO: 16188 - RNA, 21 nt, synthetic construct
  misc_feature 1..21: note = Synthetic
  source 1..21: mol_type = other RNA
atcgaatgcaaggcggggggg

SEQ ID NO: 16189 - RNA, 22 nt, synthetic construct
  misc_feature 1..22: note = Synthetic
  source 1..22: mol_type = other RNA
tatcgaatgcaaggcggggggg

SEQ ID NO: 16190 - RNA, 23 nt, synthetic construct
  misc_feature 1..23: note = Synthetic
  source 1..23: mol_type = other RNA
atatcgaatgcaaggcggggggg

SEQ ID NO: 16191 - RNA, 24 nt, synthetic construct
  misc_feature 1..24: note = Synthetic
  source 1..24: mol_type = other RNA
gatatcgaatgcaaggcggggggg

SEQ ID NO: 16192 - RNA, 18 nt, synthetic construct
  misc_feature 1..18: note = Synthetic
  source 1..18: mol_type = other RNA
tgctggtgtccgagctgg

SEQ ID NO: 16193 - RNA, 19 nt, synthetic construct
  misc_feature 1..19: note = Synthetic
  source 1..19: mol_type = other RNA
ctgctggtgtccgagctgg

SEQ ID NO: 16194 - RNA, 21 nt, synthetic construct
  misc_feature 1..21: note = Synthetic
  source 1..21: mol_type = other RNA
agctgctggtgtccgagctgg

SEQ ID NO: 16195 - RNA, 22 nt, synthetic construct
  misc_feature 1..22: note = Synthetic
  source 1..22: mol_type = other RNA
aagctgctggtgtccgagctgg

SEQ ID NO: 16196 - RNA, 23 nt, synthetic construct
  misc_feature 1..23: note = Synthetic
  source 1..23: mol_type = other RNA
caagctgctggtgtccgagctgg

SEQ ID NO: 16197 - RNA, 24 nt, synthetic construct
  misc_feature 1..24: note = Synthetic
  source 1..24: mol_type = other RNA
gcaagctgctggtgtccgagctgg

SEQ ID NO: 16198 - RNA, 18 nt, synthetic construct
  misc_feature 1..18: note = Synthetic
  source 1..18: mol_type = other RNA
acaagctcaacgccgtgg

SEQ ID NO: 16199 - RNA, 19 nt, synthetic construct
  misc_feature 1..19: note = Synthetic
  source 1..19: mol_type = other RNA
tacaagctcaacgccgtgg

SEQ ID NO: 16200 - RNA, 21 nt, synthetic construct
  misc_feature 1..21: note = Synthetic
  source 1..21: mol_type = other RNA
gctacaagctcaacgccgtgg

SEQ ID NO: 16201 - RNA, 22 nt, synthetic construct
  misc_feature 1..22: note = Synthetic
  source 1..22: mol_type = other RNA
agctacaagctcaacgccgtgg

SEQ ID NO: 16202 - RNA, 23 nt, synthetic construct
  misc_feature 1..23: note = Synthetic
  source 1..23: mol_type = other RNA
gagctacaagctcaacgccgtgg

SEQ ID NO: 16203 - RNA, 24 nt, synthetic construct
  misc_feature 1..24: note = Synthetic
  source 1..24: mol_type = other RNA
cgagctacaagctcaacgccgtgg

SEQ ID NO: 16204 - RNA, 18 nt, synthetic construct
  misc_feature 1..18: note = Synthetic
  source 1..18: mol_type = other RNA
acctggagatcgaggtgg

SEQ ID NO: 16205 - RNA, 19 nt, synthetic construct
  misc_feature 1..19: note = Synthetic
  source 1..19: mol_type = other RNA
tacctggagatcgaggtgg

SEQ ID NO: 16206 - RNA, 21 nt, synthetic construct
  misc_feature 1..21: note = Synthetic
  source 1..21: mol_type = other RNA
actacctggagatcgaggtgg

SEQ ID NO: 16207 - RNA, 22 nt, synthetic construct
  misc_feature 1..22: note = Synthetic
  source 1..22: mol_type = other RNA
gactacctggagatcgaggtgg

SEQ ID NO: 16208 - RNA, 23 nt, synthetic construct
  misc_feature 1..23: note = Synthetic
  source 1..23: mol_type = other RNA
ggactacctggagatcgaggtgg

SEQ ID NO: 16209 - RNA, 24 nt, synthetic construct
  misc_feature 1..24: note = Synthetic
  source 1..24: mol_type = other RNA
aggactacctggagatcgaggtgg

SEQ ID NO: 16210 - RNA, 18 nt, synthetic construct
  misc_feature 1..18: note = Synthetic
  source 1..18: mol_type = other RNA
acttcgaggcggaggtgg

SEQ ID NO: 16211 - RNA, 19 nt, synthetic construct
  misc_feature 1..19: note = Synthetic
  source 1..19: mol_type = other RNA
cacttcgaggcggaggtgg

SEQ ID NO: 16212 - RNA, 21 nt, synthetic construct
  misc_feature 1..21: note = Synthetic
  source 1..21: mol_type = other RNA
accacttcgaggcggaggtgg

SEQ ID NO: 16213 - RNA, 22 nt, synthetic construct
  misc_feature 1..22: note = Synthetic
  source 1..22: mol_type = other RNA
gaccacttcgaggcggaggtgg

SEQ ID NO: 16214 - RNA, 23 nt, synthetic construct
  misc_feature 1..23: note = Synthetic
  source 1..23: mol_type = other RNA
ggaccacttcgaggcggaggtgg

SEQ ID NO: 16215 - RNA, 24 nt, synthetic construct
  misc_feature 1..24: note = Synthetic
  source 1..24: mol_type = other RNA
cggaccacttcgaggcggaggtgg

SEQ ID NO: 16216 - RNA, 18 nt, synthetic construct
  misc_feature 1..18: note = Synthetic
  source 1..18: mol_type = other RNA
agctggcctttccggtgg

SEQ ID NO: 16217 - RNA, 19 nt, synthetic construct
  misc_feature 1..19: note = Synthetic
  source 1..19: mol_type = other RNA
gagctggcctttccggtgg

SEQ ID NO: 16218 - RNA, 21 nt, synthetic construct
  misc_feature 1..21: note = Synthetic
  source 1..21: mol_type = other RNA
acgagctggcctttccggtgg

SEQ ID NO: 16219 - RNA, 22 nt, synthetic construct
  misc_feature 1..22: note = Synthetic
  source 1..22: mol_type = other RNA
gacgagctggcctttccggtgg

SEQ ID NO: 16220 - RNA, 23 nt, synthetic construct
  misc_feature 1..23: note = Synthetic
  source 1..23: mol_type = other RNA
ggacgagctggcctttccggtgg

SEQ ID NO: 16221 - RNA, 24 nt, synthetic construct
  misc_feature 1..24: note = Synthetic
  source 1..24: mol_type = other RNA
aggacgagctggcctttccggtgg

SEQ ID NO: 16222 - RNA, 18 nt, synthetic construct
  misc_feature 1..18: note = Synthetic
  source 1..18: mol_type = other RNA
ataaaggtgaacggcatg

SEQ ID NO: 16223 - RNA, 19 nt, synthetic construct
  misc_feature 1..19: note = Synthetic
  source 1..19: mol_type = other RNA
gataaaggtgaacggcatg

SEQ ID NO: 16224 - RNA, 21 nt, synthetic construct
  misc_feature 1..21: note = Synthetic
  source 1..21: mol_type = other RNA
aagataaaggtgaacggcatg

SEQ ID NO: 16225 - RNA, 22 nt, synthetic construct
  misc_feature 1..22: note = Synthetic
  source 1..22: mol_type = other RNA
caagataaaggtgaacggcatg

SEQ ID NO: 16226 - RNA, 23 nt, synthetic construct
  misc_feature 1..23: note = Synthetic
  source 1..23: mol_type = other RNA
gcaagataaaggtgaacggcatg

SEQ ID NO: 16227 - RNA, 24 nt, synthetic construct
  misc_feature 1..24: note = Synthetic
  source 1..24: mol_type = other RNA
agcaagataaaggtgaacggcatg

SEQ ID NO: 16228 - RNA, 18 nt, synthetic construct
  misc_feature 1..18: note = Synthetic
  source 1..18: mol_type = other RNA
gccgtgggcgacaagatg

SEQ ID NO: 16229 - RNA, 19 nt, synthetic construct
  misc_feature 1..19: note = Synthetic
  source 1..19: mol_type = other RNA
ggccgtgggcgacaagatg

SEQ ID NO: 16230 - RNA, 21 nt, synthetic construct
  misc_feature 1..21: note = Synthetic
  source 1..21: mol_type = other RNA
acggccgtgggcgacaagatg

SEQ ID NO: 16231 - RNA, 22 nt, synthetic construct
  misc_feature 1..22: note = Synthetic
  source 1..22: mol_type = other RNA
gacggccgtgggcgacaagatg

SEQ ID NO: 16232 - RNA, 23 nt, synthetic construct
  misc_feature 1..23: note = Synthetic
  source 1..23: mol_type = other RNA
tgacggccgtgggcgacaagatg

SEQ ID NO: 16233 - RNA, 24 nt, synthetic construct
  misc_feature 1..24: note = Synthetic
  source 1..24: mol_type = other RNA
ctgacggccgtgggcgacaagatg

SEQ ID NO: 16234 - RNA, 18 nt, synthetic construct
  misc_feature 1..18: note = Synthetic
  source 1..18: mol_type = other RNA
tattacttctcccacctg

SEQ ID NO: 16235 - RNA, 19 nt, synthetic construct
  misc_feature 1..19: note = Synthetic
  source 1..19: mol_type = other RNA
ctattacttctcccacctg

SEQ ID NO: 16236 - RNA, 21 nt, synthetic construct
  misc_feature 1..21: note = Synthetic
  source 1..21: mol_type = other RNA
gactattacttctcccacctg

SEQ ID NO: 16237 - RNA, 22 nt, synthetic construct
  misc_feature 1..22: note = Synthetic
  source 1..22: mol_type = other RNA
ggactattacttctcccacctg

SEQ ID NO: 16238 - RNA, 23 nt, synthetic construct
  misc_feature 1..23: note = Synthetic
  source 1..23: mol_type = other RNA
cggactattacttctcccacctg

SEQ ID NO: 16239 - RNA, 24 nt, synthetic construct
  misc_feature 1..24: note = Synthetic
  source 1..24: mol_type = other RNA
acggactattacttctcccacctg

SEQ ID NO: 16240 - RNA, 18 nt, synthetic construct
  misc_feature 1..18: note = Synthetic
  source 1..18: mol_type = other RNA
ctcctcagcatcctcctg

SEQ ID NO: 16241 - RNA, 19 nt, synthetic construct
  misc_feature 1..19: note = Synthetic
  source 1..19: mol_type = other RNA
cctcctcagcatcctcctg

SEQ ID NO: 16242 - RNA, 21 nt, synthetic construct
  misc_feature 1..21: note = Synthetic
  source 1..21: mol_type = other RNA
agcctcctcagcatcctcctg

SEQ ID NO: 16243 - RNA, 22 nt, synthetic construct
  misc_feature 1..22: note = Synthetic
  source 1..22: mol_type = other RNA
gagcctcctcagcatcctcctg

SEQ ID NO: 16244 - RNA, 23 nt, synthetic construct
  misc_feature 1..23: note = Synthetic
  source 1..23: mol_type = other RNA
agagcctcctcagcatcctcctg

SEQ ID NO: 16245 - RNA, 24 nt, synthetic construct
  misc_feature 1..24: note = Synthetic
  source 1..24: mol_type = other RNA
gagagcctcctcagcatcctcctg

SEQ ID NO: 16246 - RNA, 18 nt, synthetic construct
  misc_feature 1..18: note = Synthetic
  source 1..18: mol_type = other RNA
gtggccgaagccgtcctg

SEQ ID NO: 16247 - RNA, 19 nt, synthetic construct
  misc_feature 1..19: note = Synthetic
  source 1..19: mol_type = other RNA
cgtggccgaagccgtcctg

SEQ ID NO: 16248 - RNA, 21 nt, synthetic construct
  misc_feature 1..21: note = Synthetic
  source 1..21: mol_type = other RNA
gccgtggccgaagccgtcctg

SEQ ID NO: 16249 - RNA, 22 nt, synthetic construct
  misc_feature 1..22: note = Synthetic
  source 1..22: mol_type = other RNA
cgccgtggccgaagccgtcctg

SEQ ID NO: 16250 - RNA, 23 nt, synthetic construct
  misc_feature 1..23: note = Synthetic
  source 1..23: mol_type = other RNA
acgccgtggccgaagccgtcctg

SEQ ID NO: 16251 - RNA, 24 nt, synthetic construct
  misc_feature 1..24: note = Synthetic
  source 1..24: mol_type = other RNA
aacgccgtggccgaagccgtcctg

SEQ ID NO: 16252 - RNA, 18 nt, synthetic construct
  misc_feature 1..18: note = Synthetic
  source 1..18: mol_type = other RNA
ttcttgctggccaagctg

SEQ ID NO: 16253 - RNA, 19 nt, synthetic construct
  misc_feature 1..19: note = Synthetic
  source 1..19: mol_type = other RNA
cttcttgctggccaagctg

SEQ ID NO: 16254 - RNA, 21 nt, synthetic construct
  misc_feature 1..21: note = Synthetic
  source 1..21: mol_type = other RNA
cccttcttgctggccaagctg

SEQ ID NO: 16255 - RNA, 22 nt, synthetic construct
  misc_feature 1..22: note = Synthetic
  source 1..22: mol_type = other RNA
gcccttcttgctggccaagctg

SEQ ID NO: 16256 - RNA, 23 nt, synthetic construct
  misc_feature 1..23: note = Synthetic
  source 1..23: mol_type = other RNA
ggcccttcttgctggccaagctg

SEQ ID NO: 16257 - RNA, 24 nt, synthetic construct
  misc_feature 1..24: note = Synthetic
  source 1..24: mol_type = other RNA
tggcccttcttgctggccaagctg

SEQ ID NO: 16258 - RNA, 18 nt, synthetic construct
  misc_feature 1..18: note = Synthetic
  source 1..18: mol_type = other RNA
atacaggattccctgctg

SEQ ID NO: 16259 - RNA, 19 nt, synthetic construct
  misc_feature 1..19: note = Synthetic
  source 1..19: mol_type = other RNA
catacaggattccctgctg

SEQ ID NO: 16260 - RNA, 21 nt, synthetic construct
  misc_feature 1..21: note = Synthetic
  source 1..21: mol_type = other RNA
tgcatacaggattccctgctg

SEQ ID NO: 16261 - RNA, 22 nt, synthetic construct
  misc_feature 1..22: note = Synthetic
  source 1..22: mol_type = other RNA
ctgcatacaggattccctgctg

SEQ ID NO: 16262 - RNA, 23 nt, synthetic construct
  misc_feature 1..23: note = Synthetic
  source 1..23: mol_type = other RNA
actgcatacaggattccctgctg

SEQ ID NO: 16263 - RNA, 24 nt, synthetic construct
  misc_feature 1..24: note = Synthetic
  source 1..24: mol_type = other RNA
tactgcatacaggattccctgctg

SEQ ID NO: 16264 - RNA, 18 nt, synthetic construct
  misc_feature 1..18: note = Synthetic
  source 1..18: mol_type = other RNA
cagaagggctttattctg

SEQ ID NO: 16265 - RNA, 19 nt, synthetic construct
  misc_feature 1..19: note = Synthetic
  source 1..19: mol_type = other RNA
ccagaagggctttattctg

SEQ ID NO: 16266 - RNA, 21 nt, synthetic construct
  misc_feature 1..21: note = Synthetic
  source 1..21: mol_type = other RNA
gaccagaagggctttattctg

SEQ ID NO: 16267 - RNA, 22 nt, synthetic construct
  misc_feature 1..22: note = Synthetic
  source 1..22: mol_type = other RNA
cgaccagaagggctttattctg

SEQ ID NO: 16268 - RNA, 23 nt, synthetic construct
  misc_feature 1..23: note = Synthetic
  source 1..23: mol_type = other RNA
ccgaccagaagggctttattctg

SEQ ID NO: 16269 - RNA, 24 nt, synthetic construct
  misc_feature 1..24: note = Synthetic
  source 1..24: mol_type = other RNA
gccgaccagaagggctttattctg

SEQ ID NO: 16270 - RNA, 18 nt, synthetic construct
  misc_feature 1..18: note = Synthetic
  source 1..18: mol_type = other RNA
cggggcgtgtttcgcgtg

SEQ ID NO: 16271 - RNA, 19 nt, synthetic construct
  misc_feature 1..19: note = Synthetic
  source 1..19: mol_type = other RNA
ccggggcgtgtttcgcgtg

SEQ ID NO: 16272 - RNA, 21 nt, synthetic construct
  misc_feature 1..21: note = Synthetic
  source 1..21: mol_type = other RNA
ggccggggcgtgtttcgcgtg

SEQ ID NO: 16273 - RNA, 22 nt, synthetic construct
  misc_feature 1..22: note = Synthetic
  source 1..22: mol_type = other RNA
cggccggggcgtgtttcgcgtg

SEQ ID NO: 16274 - RNA, 23 nt, synthetic construct
  misc_feature 1..23: note = Synthetic
  source 1..23: mol_type = other RNA
acggccggggcgtgtttcgcgtg

SEQ ID NO: 16275 - RNA, 24 nt, synthetic construct
  misc_feature 1..24: note = Synthetic
  source 1..24: mol_type = other RNA
aacggccggggcgtgtttcgcgtg

SEQ ID NO: 16276 - RNA, 18 nt, synthetic construct
  misc_feature 1..18: note = Synthetic
  source 1..18: mol_type = other RNA
tacctggagatcgaggtg

SEQ ID NO: 16277 - RNA, 19 nt, synthetic construct
  misc_feature 1..19: note = Synthetic
  source 1..19: mol_type = other RNA
ctacctggagatcgaggtg

SEQ ID NO: 16278 - RNA, 21 nt, synthetic construct
  misc_feature 1..21: note = Synthetic
  source 1..21: mol_type = other RNA
gactacctggagatcgaggtg

SEQ ID NO: 16279 - RNA, 22 nt, synthetic construct
  misc_feature 1..22: note = Synthetic
  source 1..22: mol_type = other RNA
ggactacctggagatcgaggtg

SEQ ID NO: 16280 - RNA, 23 nt, synthetic construct
  misc_feature 1..23: note = Synthetic
  source 1..23: mol_type = other RNA
aggactacctggagatcgaggtg

SEQ ID NO: 16281 - RNA, 24 nt, synthetic construct
  misc_feature 1..24: note = Synthetic
  source 1..24: mol_type = other RNA
aaggactacctggagatcgaggtg

SEQ ID NO: 16282 - RNA, 18 nt, synthetic construct
  misc_feature 1..18: note = Synthetic
  source 1..18: mol_type = other RNA
cacttcgaggcggaggtg

SEQ ID NO: 16283 - RNA, 19 nt, synthetic construct
  misc_feature 1..19: note = Synthetic
  source 1..19: mol_type = other RNA
ccacttcgaggcggaggtg

SEQ ID NO: 16284 - RNA, 21 nt, synthetic construct
  misc_feature 1..21: note = Synthetic
  source 1..21: mol_type = other RNA
gaccacttcgaggcggaggtg

SEQ ID NO: 16285 - RNA, 22 nt, synthetic construct
  misc_feature 1..22: note = Synthetic
  source 1..22: mol_type = other RNA
ggaccacttcgaggcggaggtg

SEQ ID NO: 16286 - RNA, 23 nt, synthetic construct
  misc_feature 1..23: note = Synthetic
  source 1..23: mol_type = other RNA
cggaccacttcgaggcggaggtg

SEQ ID NO: 16287 - RNA, 24 nt, synthetic construct
  misc_feature 1..24: note = Synthetic
  source 1..24: mol_type = other RNA
gcggaccacttcgaggcggaggtg

SEQ ID NO: 16288 - RNA, 18 nt, synthetic construct
  misc_feature 1..18: note = Synthetic
  source 1..18: mol_type = other RNA
tggaattcgacagcgaat

SEQ ID NO: 16289 - RNA, 19 nt, synthetic construct
  misc_feature 1..19: note = Synthetic
  source 1..19: mol_type = other RNA
ctggaattcgacagcgaat

SEQ ID NO: 16290 - RNA, 21 nt, synthetic construct
  misc_feature 1..21: note = Synthetic
  source 1..21: mol_type = other RNA
ttctggaattcgacagcgaat

SEQ ID NO: 16291 - RNA, 22 nt, synthetic construct
  misc_feature 1..22: note = Synthetic
  source 1..22: mol_type = other RNA
gttctggaattcgacagcgaat

SEQ ID NO: 16292 - RNA, 23 nt, synthetic construct
  misc_feature 1..23: note = Synthetic
  source 1..23: mol_type = other RNA
ggttctggaattcgacagcgaat

SEQ ID NO: 16293 - RNA, 24 nt, synthetic construct
  misc_feature 1..24: note = Synthetic
  source 1..24: mol_type = other RNA
tggttctggaattcgacagcgaat

SEQ ID NO: 16294 - RNA, 18 nt, synthetic construct
  misc_feature 1..18: note = Synthetic
  source 1..18: mol_type = other RNA
tttaagtttttgccccat

SEQ ID NO: 16295 - RNA, 19 nt, synthetic construct
  misc_feature 1..19: note = Synthetic
  source 1..19: mol_type = other RNA
ttttaagtttttgccccat

SEQ ID NO: 16296 - RNA, 21 nt, synthetic construct
  misc_feature 1..21: note = Synthetic
  source 1..21: mol_type = other RNA
ttttttaagtttttgccccat

SEQ ID NO: 16297 - RNA, 22 nt, synthetic construct
  misc_feature 1..22: note = Synthetic
  source 1..22: mol_type = other RNA
gttttttaagtttttgccccat

SEQ ID NO: 16298 - RNA, 23 nt, synthetic construct
  misc_feature 1..23: note = Synthetic
  source 1..23: mol_type = other RNA
tgttttttaagtttttgccccat

SEQ ID NO: 16299 - RNA, 24 nt, synthetic construct
  misc_feature 1..24: note = Synthetic
  source 1..24: mol_type = other RNA
ctgttttttaagtttttgccccat

SEQ ID NO: 16300 - RNA, 18 nt, synthetic construct
  misc_feature 1..18: note = Synthetic
  source 1..18: mol_type = other RNA
gcgggactggctcgccat

SEQ ID NO: 16301 - RNA, 19 nt, synthetic construct
  misc_feature 1..19: note = Synthetic
  source 1..19: mol_type = other RNA
tgcgggactggctcgccat

SEQ ID NO: 16302 - RNA, 21 nt, synthetic construct
  misc_feature 1..21: note = Synthetic
  source 1..21: mol_type = other RNA
cctgcgggactggctcgccat

SEQ ID NO: 16303 - RNA, 22 nt, synthetic construct
  misc_feature 1..22: note = Synthetic
  source 1..22: mol_type = other RNA
tcctgcgggactggctcgccat

SEQ ID NO: 16304 - RNA, 23 nt, synthetic construct
  misc_feature 1..23: note = Synthetic
  source 1..23: mol_type = other RNA
ctcctgcgggactggctcgccat

SEQ ID NO: 16305 - RNA, 24 nt, synthetic construct
  misc_feature 1..24: note = Synthetic
  source 1..24: mol_type = other RNA
cctcctgcgggactggctcgccat

SEQ ID NO: 16306 - RNA, 18 nt, synthetic construct
  misc_feature 1..18: note = Synthetic
  source 1..18: mol_type = other RNA
gcatctccgcggaccact

SEQ ID NO: 16307 - RNA, 19 nt, synthetic construct
  misc_feature 1..19: note = Synthetic
  source 1..19: mol_type = other RNA
ggcatctccgcggaccact

SEQ ID NO: 16308 - RNA, 21 nt, synthetic construct
  misc_feature 1..21: note = Synthetic
  source 1..21: mol_type = other RNA
gcggcatctccgcggaccact

SEQ ID NO: 16309 - RNA, 22 nt, synthetic construct
  misc_feature 1..22: note = Synthetic
  source 1..22: mol_type = other RNA
cgcggcatctccgcggaccact

SEQ ID NO: 16310 - RNA, 23 nt, synthetic construct
  misc_feature 1..23: note = Synthetic
  source 1..23: mol_type = other RNA
ccgcggcatctccgcggaccact

SEQ ID NO: 16311 - RNA, 24 nt, synthetic construct
  misc_feature 1..24: note = Synthetic
  source 1..24: mol_type = other RNA
tccgcggcatctccgcggaccact

SEQ ID NO: 16312 - RNA, 18 nt, synthetic construct
  misc_feature 1..18: note = Synthetic
  source 1..18: mol_type = other RNA
acgctcctgggcctgact

SEQ ID NO: 16313 - RNA, 19 nt, synthetic construct
  misc_feature 1..19: note = Synthetic
  source 1..19: mol_type = other RNA
cacgctcctgggcctgact

SEQ ID NO: 16314 - RNA, 21 nt, synthetic construct
  misc_feature 1..21: note = Synthetic
  source 1..21: mol_type = other RNA
atcacgctcctgggcctgact

SEQ ID NO: 16315 - RNA, 22 nt, synthetic construct
  misc_feature 1..22: note = Synthetic
  source 1..22: mol_type = other RNA
catcacgctcctgggcctgact

SEQ ID NO: 16316 - RNA, 23 nt, synthetic construct
  misc_feature 1..23: note = Synthetic
  source 1..23: mol_type = other RNA
tcatcacgctcctgggcctgact

SEQ ID NO: 16317 - RNA, 24 nt, synthetic construct
  misc_feature 1..24: note = Synthetic
  source 1..24: mol_type = other RNA
gtcatcacgctcctgggcctgact

SEQ ID NO: 16318 - RNA, 18 nt, synthetic construct
  misc_feature 1..18: note = Synthetic
  source 1..18: mol_type = other RNA
gcaccgacgtgtactact

SEQ ID NO: 16319 - RNA, 19 nt, synthetic construct
  misc_feature 1..19: note = Synthetic
  source 1..19: mol_type = other RNA
cgcaccgacgtgtactact

SEQ ID NO: 16320 - RNA, 21 nt, synthetic construct
  misc_feature 1..21: note = Synthetic
  source 1..21: mol_type = other RNA
agcgcaccgacgtgtactact

SEQ ID NO: 16321 - RNA, 22 nt, synthetic construct
  misc_feature 1..22: note = Synthetic
  source 1..22: mol_type = other RNA
gagcgcaccgacgtgtactact

SEQ ID NO: 16322 - RNA, 23 nt, synthetic construct
  misc_feature 1..23: note = Synthetic
  source 1..23: mol_type = other RNA
ggagcgcaccgacgtgtactact

SEQ ID NO: 16323 - RNA, 24 nt, synthetic construct
  misc_feature 1..24: note = Synthetic
  source 1..24: mol_type = other RNA
tggagcgcaccgacgtgtactact

SEQ ID NO: 16324 - RNA, 18 nt, synthetic construct
  misc_feature 1..18: note = Synthetic
  source 1..18: mol_type = other RNA
cttcagcacgctctccct

SEQ ID NO: 16325 - RNA, 19 nt, synthetic construct
  misc_feature 1..19: note = Synthetic
  source 1..19: mol_type = other RNA
gcttcagcacgctctccct

SEQ ID NO: 16326 - RNA, 21 nt, synthetic construct
  misc_feature 1..21: note = Synthetic
  source 1..21: mol_type = other RNA
gtgcttcagcacgctctccct

SEQ ID NO: 16327 - RNA, 22 nt, synthetic construct
  misc_feature 1..22: note = Synthetic
  source 1..22: mol_type = other RNA
tgtgcttcagcacgctctccct

SEQ ID NO: 16328 - RNA, 23 nt, synthetic construct
  misc_feature 1..23: note = Synthetic
  source 1..23: mol_type = other RNA
ctgtgcttcagcacgctctccct

SEQ ID NO: 16329 - RNA, 24 nt, synthetic construct
  misc_feature 1..24: note = Synthetic
  source 1..24: mol_type = other RNA
cctgtgcttcagcacgctctccct

SEQ ID NO: 16330 - RNA, 18 nt, synthetic construct
  misc_feature 1..18: note = Synthetic
  source 1..18: mol_type = other RNA
acgcgcgctgggcggcct

SEQ ID NO: 16331 - RNA, 19 nt, synthetic construct
  misc_feature 1..19: note = Synthetic
  source 1..19: mol_type = other RNA
cacgcgcgctgggcggcct

SEQ ID NO: 16332 - RNA, 21 nt, synthetic construct
  misc_feature 1..21: note = Synthetic
  source 1..21: mol_type = other RNA
tccacgcgcgctgggcggcct

SEQ ID NO: 16333 - RNA, 22 nt, synthetic construct
  misc_feature 1..22: note = Synthetic
  source 1..22: mol_type = other RNA
gtccacgcgcgctgggcggcct

SEQ ID NO: 16334 - RNA, 23 nt, synthetic construct
  misc_feature 1..23: note = Synthetic
  source 1..23: mol_type = other RNA
cgtccacgcgcgctgggcggcct

SEQ ID NO: 16335 - RNA, 24 nt, synthetic construct
  misc_feature 1..24: note = Synthetic
  source 1..24: mol_type = other RNA
acgtccacgcgcgctgggcggcct

SEQ ID NO: 16336 - RNA, 18 nt, synthetic construct
  misc_feature 1..18: note = Synthetic
  source 1..18: mol_type = other RNA
cggcggccccgatggcct

SEQ ID NO: 16337 - RNA, 19 nt, synthetic construct
  misc_feature 1..19: note = Synthetic
  source 1..19: mol_type = other RNA
ccggcggccccgatggcct

SEQ ID NO: 16338 - RNA, 21 nt, synthetic construct
  misc_feature 1..21: note = Synthetic
  source 1..21: mol_type = other RNA
agccggcggccccgatggcct

SEQ ID NO: 16339 - RNA, 22 nt, synthetic construct
  misc_feature 1..22: note = Synthetic
  source 1..22: mol_type = other RNA
cagccggcggccccgatggcct

SEQ ID NO: 16340 - RNA, 23 nt, synthetic construct
  misc_feature 1..23: note = Synthetic
  source 1..23: mol_type = other RNA
ccagccggcggccccgatggcct

SEQ ID NO: 16341 - RNA, 24 nt, synthetic construct
  misc_feature 1..24: note = Synthetic
  source 1..24: mol_type = other RNA
cccagccggcggccccgatggcct

SEQ ID NO: 16342 - RNA, 18 nt, synthetic construct
  misc_feature 1..18: note = Synthetic
  source 1..18: mol_type = other RNA
cctcctcagcatcctcct

SEQ ID NO: 16343 - RNA, 19 nt, synthetic construct
  misc_feature 1..19: note = Synthetic
  source 1..19: mol_type = other RNA
gcctcctcagcatcctcct

SEQ ID NO: 16344 - RNA, 21 nt, synthetic construct
  misc_feature 1..21: note = Synthetic
  source 1..21: mol_type = other RNA
gagcctcctcagcatcctcct

SEQ ID NO: 16345 - RNA, 22 nt, synthetic construct
  misc_feature 1..22: note = Synthetic
  source 1..22: mol_type = other RNA
agagcctcctcagcatcctcct

SEQ ID NO: 16346 - RNA, 23 nt, synthetic construct
  misc_feature 1..23: note = Synthetic
  source 1..23: mol_type = other RNA
gagagcctcctcagcatcctcct

SEQ ID NO: 16347 - RNA, 24 nt, synthetic construct
  misc_feature 1..24: note = Synthetic
  source 1..24: mol_type = other RNA
agagagcctcctcagcatcctcct

SEQ ID NO: 16348 - RNA, 18 nt, synthetic construct
  misc_feature 1..18: note = Synthetic
  source 1..18: mol_type = other RNA
cgacgtggccgcgcggct

SEQ ID NO: 16349 - RNA, 19 nt, synthetic construct
  misc_feature 1..19: note = Synthetic
  source 1..19: mol_type = other RNA
acgacgtggccgcgcggct

SEQ ID NO: 16350 - RNA, 21 nt, synthetic construct
  misc_feature 1..21: note = Synthetic
  source 1..21: mol_type = other RNA
ggacgacgtggccgcgcggct

SEQ ID NO: 16351 - RNA, 22 nt, synthetic construct
  misc_feature 1..22: note = Synthetic
  source 1..22: mol_type = other RNA
cggacgacgtggccgcgcggct

SEQ ID NO: 16352 - RNA, 23 nt, synthetic construct
  misc_feature 1..23: note = Synthetic
  source 1..23: mol_type = other RNA
ccggacgacgtggccgcgcggct

SEQ ID NO: 16353 - RNA, 24 nt, synthetic construct
  misc_feature 1..24: note = Synthetic
  source 1..24: mol_type = other RNA
cccggacgacgtggccgcgcggct

SEQ ID NO: 16354 - RNA, 18 nt, synthetic construct
  misc_feature 1..18: note = Synthetic
  source 1..18: mol_type = other RNA
attccatgcgcatcatct

SEQ ID NO: 16355 - RNA, 19 nt, synthetic construct
  misc_feature 1..19: note = Synthetic
  source 1..19: mol_type = other RNA
tattccatgcgcatcatct

SEQ ID NO: 16356 - RNA, 21 nt, synthetic construct
  misc_feature 1..21: note = Synthetic
  source 1..21: mol_type = other RNA
cctattccatgcgcatcatct

SEQ ID NO: 16357 - RNA, 22 nt, synthetic construct
  misc_feature 1..22: note = Synthetic
  source 1..22: mol_type = other RNA
ccctattccatgcgcatcatct

SEQ ID NO: 16358 - RNA, 23 nt, synthetic construct
  misc_feature 1..23: note = Synthetic
  source 1..23: mol_type = other RNA
gccctattccatgcgcatcatct

SEQ ID NO: 16359 - RNA, 24 nt, synthetic construct
  misc_feature 1..24: note = Synthetic
  source 1..24: mol_type = other RNA
ggccctattccatgcgcatcatct

SEQ ID NO: 16360 - RNA, 18 nt, synthetic construct
  misc_feature 1..18: note = Synthetic
  source 1..18: mol_type = other RNA
agtacatcggcgtcatct

SEQ ID NO: 16361 - RNA, 19 nt, synthetic construct
  misc_feature 1..19: note = Synthetic
  source 1..19: mol_type = other RNA
aagtacatcggcgtcatct

SEQ ID NO: 16362 - RNA, 21 nt, synthetic construct
  misc_feature 1..21: note = Synthetic
  source 1..21: mol_type = other RNA
aaaagtacatcggcgtcatct

SEQ ID NO: 16363 - RNA, 22 nt, synthetic construct
  misc_feature 1..22: note = Synthetic
  source 1..22: mol_type = other RNA
aaaaagtacatcggcgtcatct

SEQ ID NO: 16364 - RNA, 23 nt, synthetic construct
  misc_feature 1..23: note = Synthetic
  source 1..23: mol_type = other RNA
gaaaaagtacatcggcgtcatct

SEQ ID NO: 16365 - RNA, 24 nt, synthetic construct
  misc_feature 1..24: note = Synthetic
  source 1..24: mol_type = other RNA
agaaaaagtacatcggcgtcatct

SEQ ID NO: 16366 - RNA, 18 nt, synthetic construct
  misc_feature 1..18: note = Synthetic
  source 1..18: mol_type = other RNA
gcgccccacgagatctct

SEQ ID NO: 16367 - RNA, 19 nt, synthetic construct
  misc_feature 1..19: note = Synthetic
  source 1..19: mol_type = other RNA
cgcgccccacgagatctct

SEQ ID NO: 16368 - RNA, 21 nt, synthetic construct
  misc_feature 1..21: note = Synthetic
  source 1..21: mol_type = other RNA
gccgcgccccacgagatctct

SEQ ID NO: 16369 - RNA, 22 nt, synthetic construct
  misc_feature 1..22: note = Synthetic
  source 1..22: mol_type = other RNA
tgccgcgccccacgagatctct

SEQ ID NO: 16370 - RNA, 23 nt, synthetic construct
  misc_feature 1..23: note = Synthetic
  source 1..23: mol_type = other RNA
atgccgcgccccacgagatctct

SEQ ID NO: 16371 - RNA, 24 nt, synthetic construct
  misc_feature 1..24: note = Synthetic
  source 1..24: mol_type = other RNA
aatgccgcgccccacgagatctct

SEQ ID NO: 16372 - RNA, 18 nt, synthetic construct
  misc_feature 1..18: note = Synthetic
  source 1..18: mol_type = other RNA
tttacgacgataccgtct

SEQ ID NO: 16373 - RNA, 19 nt, synthetic construct
  misc_feature 1..19: note = Synthetic
  source 1..19: mol_type = other RNA
ttttacgacgataccgtct

SEQ ID NO: 16374 - RNA, 21 nt, synthetic construct
  misc_feature 1..21: note = Synthetic
  source 1..21: mol_type = other RNA
tgttttacgacgataccgtct

SEQ ID NO: 16375 - RNA, 22 nt, synthetic construct
  misc_feature 1..22: note = Synthetic
  source 1..22: mol_type = other RNA
ctgttttacgacgataccgtct

SEQ ID NO: 16376 - RNA, 23 nt, synthetic construct
  misc_feature 1..23: note = Synthetic
  source 1..23: mol_type = other RNA
gctgttttacgacgataccgtct

SEQ ID NO: 16377 - RNA, 24 nt, synthetic construct
  misc_feature 1..24: note = Synthetic
  source 1..24: mol_type = other RNA
tgctgttttacgacgataccgtct

SEQ ID NO: 16378 - RNA, 18 nt, synthetic construct
  misc_feature 1..18: note = Synthetic
  source 1..18: mol_type = other RNA
gcccggccatcaagaagt

SEQ ID NO: 16379 - RNA, 19 nt, synthetic construct
  misc_feature 1..19: note = Synthetic
  source 1..19: mol_type = other RNA
tgcccggccatcaagaagt

SEQ ID NO: 16380 - RNA, 21 nt, synthetic construct
  misc_feature 1..21: note = Synthetic
  source 1..21: mol_type = other RNA
tctgcccggccatcaagaagt

SEQ ID NO: 16381 - RNA, 22 nt, synthetic construct
  misc_feature 1..22: note = Synthetic
  source 1..22: mol_type = other RNA
ttctgcccggccatcaagaagt

SEQ ID NO: 16382 - RNA, 23 nt, synthetic construct
  misc_feature 1..23: note = Synthetic
  source 1..23: mol_type = other RNA
cttctgcccggccatcaagaagt

SEQ ID NO: 16383 - RNA, 24 nt, synthetic construct
  misc_feature 1..24: note = Synthetic
  source 1..24: mol_type = other RNA
acttctgcccggccatcaagaagt

SEQ ID NO: 16384 - RNA, 18 nt, synthetic construct
  misc_feature 1..18: note = Synthetic
  source 1..18: mol_type = other RNA
cccccatcaaactcgagt

SEQ ID NO: 16385 - RNA, 19 nt, synthetic construct
  misc_feature 1..19: note = Synthetic
  source 1..19: mol_type = other RNA
ccccccatcaaactcgagt

SEQ ID NO: 16386 - RNA, 21 nt, synthetic construct
  misc_feature 1..21: note = Synthetic
  source 1..21: mol_type = other RNA
tgccccccatcaaactcgagt

SEQ ID NO: 16387 - RNA, 22 nt, synthetic construct
  misc_feature 1..22: note = Synthetic
  source 1..22: mol_type = other RNA
ctgccccccatcaaactcgagt

SEQ ID NO: 16388 - RNA, 23 nt, synthetic construct
  misc_feature 1..23: note = Synthetic
  source 1..23: mol_type = other RNA
tctgccccccatcaaactcgagt

SEQ ID NO: 16389 - RNA, 24 nt, synthetic construct
  misc_feature 1..24: note = Synthetic
  source 1..24: mol_type = other RNA
ttctgccccccatcaaactcgagt

SEQ ID NO: 16390 - RNA, 18 nt, synthetic construct
  misc_feature 1..18: note = Synthetic
  source 1..18: mol_type = other RNA
cttcgtcaaggctcacgt

SEQ ID NO: 16391 - RNA, 19 nt, synthetic construct
  misc_feature 1..19: note = Synthetic
  source 1..19: mol_type = other RNA
tcttcgtcaaggctcacgt

SEQ ID NO: 16392 - RNA, 21 nt, synthetic construct
  misc_feature 1..21: note = Synthetic
  source 1..21: mol_type = other RNA
gttcttcgtcaaggctcacgt

SEQ ID NO: 16393 - RNA, 22 nt, synthetic construct
  misc_feature 1..22: note = Synthetic
  source 1..22: mol_type = other RNA
tgttcttcgtcaaggctcacgt

SEQ ID NO: 16394 - RNA, 23 nt, synthetic construct
  misc_feature 1..23: note = Synthetic
  source 1..23: mol_type = other RNA
ctgttcttcgtcaaggctcacgt

SEQ ID NO: 16395 - RNA, 24 nt, synthetic construct
  misc_feature 1..24: note = Synthetic
  source 1..24: mol_type = other RNA
gctgttcttcgtcaaggctcacgt

SEQ ID NO: 16396 - RNA, 18 nt, synthetic construct
  misc_feature 1..18: note = Synthetic
  source 1..18: mol_type = other RNA
gttttaccgcgtctacgt

SEQ ID NO: 16397 - RNA, 19 nt, synthetic construct
  misc_feature 1..19: note = Synthetic
  source 1..19: mol_type = other RNA
tgttttaccgcgtctacgt

SEQ ID NO: 16398 - RNA, 21 nt, synthetic construct
  misc_feature 1..21: note = Synthetic
  source 1..21: mol_type = other RNA
tctgttttaccgcgtctacgt

SEQ ID NO: 16399 - RNA, 22 nt, synthetic construct
  misc_feature 1..22: note = Synthetic
  source 1..22: mol_type = other RNA
ctctgttttaccgcgtctacgt

SEQ ID NO: 16400 - RNA, 23 nt, synthetic construct
  misc_feature 1..23: note = Synthetic
  source 1..23: mol_type = other RNA
gctctgttttaccgcgtctacgt

SEQ ID NO: 16401 - RNA, 24 nt, synthetic construct
  misc_feature 1..24: note = Synthetic
  source 1..24: mol_type = other RNA
cgctctgttttaccgcgtctacgt

SEQ ID NO: 16402 - RNA, 18 nt, synthetic construct
  misc_feature 1..18: note = Synthetic
  source 1..18: mol_type = other RNA
ccggggcgtgtttcgcgt

SEQ ID NO: 16403 - RNA, 19 nt, synthetic construct
  misc_feature 1..19: note = Synthetic
  source 1..19: mol_type = other RNA
gccggggcgtgtttcgcgt

SEQ ID NO: 16404 - RNA, 21 nt, synthetic construct
  misc_feature 1..21: note = Synthetic
  source 1..21: mol_type = other RNA
cggccggggcgtgtttcgcgt

SEQ ID NO: 16405 - RNA, 22 nt, synthetic construct
  misc_feature 1..22: note = Synthetic
  source 1..22: mol_type = other RNA
acggccggggcgtgtttcgcgt

SEQ ID NO: 16406 - RNA, 23 nt, synthetic construct
  misc_feature 1..23: note = Synthetic
  source 1..23: mol_type = other RNA
aacggccggggcgtgtttcgcgt

SEQ ID NO: 16407 - RNA, 24 nt, synthetic construct
  misc_feature 1..24: note = Synthetic
  source 1..24: mol_type = other RNA
gaacggccggggcgtgtttcgcgt

SEQ ID NO: 16408 - RNA, 18 nt, synthetic construct
  misc_feature 1..18: note = Synthetic
  source 1..18: mol_type = other RNA
ccgagggactgcaggcgt

SEQ ID NO: 16409 - RNA, 19 nt, synthetic construct
  misc_feature 1..19: note = Synthetic
  source 1..19: mol_type = other RNA
cccgagggactgcaggcgt

SEQ ID NO: 16410 - RNA, 21 nt, synthetic construct
  misc_feature 1..21: note = Synthetic
  source 1..21: mol_type = other RNA
tgcccgagggactgcaggcgt

SEQ ID NO: 16411 - RNA, 22 nt, synthetic construct
  misc_feature 1..22: note = Synthetic
  source 1..22: mol_type = other RNA
ctgcccgagggactgcaggcgt

SEQ ID NO: 16412 - RNA, 23 nt, synthetic construct
  misc_feature 1..23: note = Synthetic
  source 1..23: mol_type = other RNA
cctgcccgagggactgcaggcgt

SEQ ID NO: 16413 - RNA, 24 nt, synthetic construct
  misc_feature 1..24: note = Synthetic
  source 1..24: mol_type = other RNA
ccctgcccgagggactgcaggcgt

SEQ ID NO: 16414 - RNA, 18 nt, synthetic construct
  misc_feature 1..18: note = Synthetic
  source 1..18: mol_type = other RNA
ctacctggagatcgaggt

SEQ ID NO: 16415 - RNA, 19 nt, synthetic construct
  misc_feature 1..19: note = Synthetic
  source 1..19: mol_type = other RNA
actacctggagatcgaggt

SEQ ID NO: 16416 - RNA, 21 nt, synthetic construct
  misc_feature 1..21: note = Synthetic
  source 1..21: mol_type = other RNA
ggactacctggagatcgaggt

SEQ ID NO: 16417 - RNA, 22 nt, synthetic construct
  misc_feature 1..22: note = Synthetic
  source 1..22: mol_type = other RNA
aggactacctggagatcgaggt

SEQ ID NO: 16418 - RNA, 23 nt, synthetic construct
  misc_feature 1..23: note = Synthetic
  source 1..23: mol_type = other RNA
aaggactacctggagatcgaggt

SEQ ID NO: 16419 - RNA, 24 nt, synthetic construct
  misc_feature 1..24: note = Synthetic
  source 1..24: mol_type = other RNA
caaggactacctggagatcgaggt

SEQ ID NO: 16420 - RNA, 18 nt, synthetic construct
  misc_feature 1..18: note = Synthetic
  source 1..18: mol_type = other RNA
ggctccggaccgcagggt

SEQ ID NO: 16421 - RNA, 19 nt, synthetic construct
  misc_feature 1..19: note = Synthetic
  source 1..19: mol_type = other RNA
cggctccggaccgcagggt

SEQ ID NO: 16422 - RNA, 21 nt, synthetic construct
  misc_feature 1..21: note = Synthetic
  source 1..21: mol_type = other RNA
cgcggctccggaccgcagggt

SEQ ID NO: 16423 - RNA, 22 nt, synthetic construct
  misc_feature 1..22: note = Synthetic
  source 1..22: mol_type = other RNA
gcgcggctccggaccgcagggt

SEQ ID NO: 16424 - RNA, 23 nt, synthetic construct
  misc_feature 1..23: note = Synthetic
  source 1..23: mol_type = other RNA
cgcgcggctccggaccgcagggt

SEQ ID NO: 16425 - RNA, 24 nt, synthetic construct
  misc_feature 1..24: note = Synthetic
  source 1..24: mol_type = other RNA
ccgcgcggctccggaccgcagggt

SEQ ID NO: 16426 - RNA, 18 nt, synthetic construct
  misc_feature 1..18: note = Synthetic
  source 1..18: mol_type = other RNA
tggtgaacatcgacatgt

SEQ ID NO: 16427 - RNA, 19 nt, synthetic construct
  misc_feature 1..19: note = Synthetic
  source 1..19: mol_type = other RNA
atggtgaacatcgacatgt

SEQ ID NO: 16428 - RNA, 21 nt, synthetic construct
  misc_feature 1..21: note = Synthetic
  source 1..21: mol_type = other RNA
gcatggtgaacatcgacatgt

SEQ ID NO: 16429 - RNA, 22 nt, synthetic construct
  misc_feature 1..22: note = Synthetic
  source 1..22: mol_type = other RNA
ggcatggtgaacatcgacatgt

SEQ ID NO: 16430 - RNA, 23 nt, synthetic construct
  misc_feature 1..23: note = Synthetic
  source 1..23: mol_type = other RNA
cggcatggtgaacatcgacatgt

SEQ ID NO: 16431 - RNA, 24 nt, synthetic construct
  misc_feature 1..24: note = Synthetic
  source 1..24: mol_type = other RNA
acggcatggtgaacatcgacatgt

SEQ ID NO: 16432 - RNA, 18 nt, synthetic construct
  misc_feature 1..18: note = Synthetic
  source 1..18: mol_type = other RNA
attacttctcccacctgt

SEQ ID NO: 16433 - RNA, 19 nt, synthetic construct
  misc_feature 1..19: note = Synthetic
  source 1..19: mol_type = other RNA
tattacttctcccacctgt

SEQ ID NO: 16434 - RNA, 21 nt, synthetic construct
  misc_feature 1..21: note = Synthetic
  source 1..21: mol_type = other RNA
actattacttctcccacctgt

SEQ ID NO: 16435 - RNA, 22 nt, synthetic construct
  misc_feature 1..22: note = Synthetic
  source 1..22: mol_type = other RNA
gactattacttctcccacctgt

SEQ ID NO: 16436 - RNA, 23 nt, synthetic construct
  misc_feature 1..23: note = Synthetic
  source 1..23: mol_type = other RNA
ggactattacttctcccacctgt

SEQ ID NO: 16437 - RNA, 24 nt, synthetic construct
  misc_feature 1..24: note = Synthetic
  source 1..24: mol_type = other RNA
cggactattacttctcccacctgt

SEQ ID NO: 16438 - RNA, 18 nt, synthetic construct
  misc_feature 1..18: note = Synthetic
  source 1..18: mol_type = other RNA
tgacattcaaggccctgt

SEQ ID NO: 16439 - RNA, 19 nt, synthetic construct
  misc_feature 1..19: note = Synthetic
  source 1..19: mol_type = other RNA
gtgacattcaaggccctgt

SEQ ID NO: 16440 - RNA, 21 nt, synthetic construct
  misc_feature 1..21: note = Synthetic
  source 1..21: mol_type = other RNA
gcgtgacattcaaggccctgt

SEQ ID NO: 16441 - RNA, 22 nt, synthetic construct
  misc_feature 1..22: note = Synthetic
  source 1..22: mol_type = other RNA
tgcgtgacattcaaggccctgt

SEQ ID NO: 16442 - RNA, 23 nt, synthetic construct
  misc_feature 1..23: note = Synthetic
  source 1..23: mol_type = other RNA
gtgcgtgacattcaaggccctgt

SEQ ID NO: 16443 - RNA, 24 nt, synthetic construct
  misc_feature 1..24: note = Synthetic
  source 1..24: mol_type = other RNA
cgtgcgtgacattcaaggccctgt

SEQ ID NO: 16444 - RNA, 18 nt, synthetic construct
  misc_feature 1..18: note = Synthetic
  source 1..18: mol_type = other RNA
cccgcaagctgctggtgt

SEQ ID NO: 16445 - RNA, 19 nt, synthetic construct
  misc_feature 1..19: note = Synthetic
  source 1..19: mol_type = other RNA
ccccgcaagctgctggtgt

SEQ ID NO: 16446 - RNA, 21 nt, synthetic construct
  misc_feature 1..21: note = Synthetic
  source 1..21: mol_type = other RNA
agccccgcaagctgctggtgt

SEQ ID NO: 16447 - RNA, 22 nt, synthetic construct
  misc_feature 1..22: note = Synthetic
  source 1..22: mol_type = other RNA
aagccccgcaagctgctggtgt

SEQ ID NO: 16448 - RNA, 23 nt, synthetic construct
  misc_feature 1..23: note = Synthetic
  source 1..23: mol_type = other RNA
caagccccgcaagctgctggtgt

SEQ ID NO: 16449 - RNA, 24 nt, synthetic construct
  misc_feature 1..24: note = Synthetic
  source 1..24: mol_type = other RNA
ccaagccccgcaagctgctggtgt

SEQ ID NO: 16450 - RNA, 18 nt, synthetic construct
  misc_feature 1..18: note = Synthetic
  source 1..18: mol_type = other RNA
ggacacccaggggcgatt

SEQ ID NO: 16451 - RNA, 19 nt, synthetic construct
  misc_feature 1..19: note = Synthetic
  source 1..19: mol_type = other RNA
cggacacccaggggcgatt

SEQ ID NO: 16452 - RNA, 21 nt, synthetic construct
  misc_feature 1..21: note = Synthetic
  source 1..21: mol_type = other RNA
gccggacacccaggggcgatt

SEQ ID NO: 16453 - RNA, 22 nt, synthetic construct
  misc_feature 1..22: note = Synthetic
  source 1..22: mol_type = other RNA
tgccggacacccaggggcgatt

SEQ ID NO: 16454 - RNA, 23 nt, synthetic construct
  misc_feature 1..23: note = Synthetic
  source 1..23: mol_type = other RNA
ctgccggacacccaggggcgatt

SEQ ID NO: 16455 - RNA, 24 nt, synthetic construct
  misc_feature 1..24: note = Synthetic
  source 1..24: mol_type = other RNA
tctgccggacacccaggggcgatt

SEQ ID NO: 16456 - RNA, 18 nt, synthetic construct
  misc_feature 1..18: note = Synthetic
  source 1..18: mol_type = other RNA
ttggccttcatgaccctt

SEQ ID NO: 16457 - RNA, 19 nt, synthetic construct
  misc_feature 1..19: note = Synthetic
  source 1..19: mol_type = other RNA
gttggccttcatgaccctt

SEQ ID NO: 16458 - RNA, 21 nt, synthetic construct
  misc_feature 1..21: note = Synthetic
  source 1..21: mol_type = other RNA
ctgttggccttcatgaccctt

SEQ ID NO: 16459 - RNA, 22 nt, synthetic construct
  misc_feature 1..22: note = Synthetic
  source 1..22: mol_type = other RNA
gctgttggccttcatgaccctt

SEQ ID NO: 16460 - RNA, 23 nt, synthetic construct
  misc_feature 1..23: note = Synthetic
  source 1..23: mol_type = other RNA
tgctgttggccttcatgaccctt

SEQ ID NO: 16461 - RNA, 24 nt, synthetic construct
  misc_feature 1..24: note = Synthetic
  source 1..24: mol_type = other RNA
atgctgttggccttcatgaccctt

SEQ ID NO: 16462 - RNA, 18 nt, synthetic construct
  misc_feature 1..18: note = Synthetic
  source 1..18: mol_type = other RNA
ggcggccccgatggcctt

SEQ ID NO: 16463 - RNA, 19 nt, synthetic construct
  misc_feature 1..19: note = Synthetic
  source 1..19: mol_type = other RNA
cggcggccccgatggcctt

SEQ ID NO: 16464 - RNA, 21 nt, synthetic construct
  misc_feature 1..21: note = Synthetic
  source 1..21: mol_type = other RNA
gccggcggccccgatggcctt

SEQ ID NO: 16465 - RNA, 22 nt, synthetic construct
  misc_feature 1..22: note = Synthetic
  source 1..22: mol_type = other RNA
agccggcggccccgatggcctt

SEQ ID NO: 16466 - RNA, 23 nt, synthetic construct
  misc_feature 1..23: note = Synthetic
  source 1..23: mol_type = other RNA
cagccggcggccccgatggcctt

SEQ ID NO: 16467 - RNA, 24 nt, synthetic construct
  misc_feature 1..24: note = Synthetic
  source 1..24: mol_type = other RNA
ccagccggcggccccgatggcctt

SEQ ID NO: 16468 - RNA, 18 nt, synthetic construct
  misc_feature 1..18: note = Synthetic
  source 1..18: mol_type = other RNA
cgagggactgcaggcgtt

SEQ ID NO: 16469 - RNA, 19 nt, synthetic construct
  misc_feature 1..19: note = Synthetic
  source 1..19: mol_type = other RNA
ccgagggactgcaggcgtt

SEQ ID NO: 16470 - RNA, 21 nt, synthetic construct
  misc_feature 1..21: note = Synthetic
  source 1..21: mol_type = other RNA
gcccgagggactgcaggcgtt

SEQ ID NO: 16471 - RNA, 22 nt, synthetic construct
  misc_feature 1..22: note = Synthetic
  source 1..22: mol_type = other RNA
tgcccgagggactgcaggcgtt

SEQ ID NO: 16472 - RNA, 23 nt, synthetic construct
  misc_feature 1..23: note = Synthetic
  source 1..23: mol_type = other RNA
ctgcccgagggactgcaggcgtt

SEQ ID NO: 16473 - RNA, 24 nt, synthetic construct
  misc_feature 1..24: note = Synthetic
  source 1..24: mol_type = other RNA
cctgcccgagggactgcaggcgtt

SEQ ID NO: 16474 - RNA, 18 nt, synthetic construct
  misc_feature 1..18: note = Synthetic
  source 1..18: mol_type = other RNA
gctccggaccgcagggtt

SEQ ID NO: 16475 - RNA, 19 nt, synthetic construct
  misc_feature 1..19: note = Synthetic
  source 1..19: mol_type = other RNA
ggctccggaccgcagggtt

SEQ ID NO: 16476 - RNA, 21 nt, synthetic construct
  misc_feature 1..21: note = Synthetic
  source 1..21: mol_type = other RNA
gcggctccggaccgcagggtt

SEQ ID NO: 16477 - RNA, 22 nt, synthetic construct
  misc_feature 1..22: note = Synthetic
  source 1..22: mol_type = other RNA
cgcggctccggaccgcagggtt

SEQ ID NO: 16478 - RNA, 23 nt, synthetic construct
  misc_feature 1..23: note = Synthetic
  source 1..23: mol_type = other RNA
gcgcggctccggaccgcagggtt

SEQ ID NO: 16479 - RNA, 24 nt, synthetic construct
  misc_feature 1..24: note = Synthetic
  source 1..24: mol_type = other RNA
cgcgcggctccggaccgcagggtt

SEQ ID NO: 16480 - RNA, 18 nt, synthetic construct
  misc_feature 1..18: note = Synthetic
  source 1..18: mol_type = other RNA
ctgcccacgcccgtggtt

SEQ ID NO: 16481 - RNA, 19 nt, synthetic construct
  misc_feature 1..19: note = Synthetic
  source 1..19: mol_type = other RNA
cctgcccacgcccgtggtt

SEQ ID NO: 16482 - RNA, 21 nt, synthetic construct
  misc_feature 1..21: note = Synthetic
  source 1..21: mol_type = other RNA
ggcctgcccacgcccgtggtt

SEQ ID NO: 16483 - RNA, 22 nt, synthetic construct
  misc_feature 1..22: note = Synthetic
  source 1..22: mol_type = other RNA
gggcctgcccacgcccgtggtt

SEQ ID NO: 16484 - RNA, 23 nt, synthetic construct
  misc_feature 1..23: note = Synthetic
  source 1..23: mol_type = other RNA
ggggcctgcccacgcccgtggtt

SEQ ID NO: 16485 - RNA, 24 nt, synthetic construct
  misc_feature 1..24: note = Synthetic
  source 1..24: mol_type = other RNA
aggggcctgcccacgcccgtggtt

SEQ ID NO: 16486 - RNA, 18 nt, synthetic construct
  misc_feature 1..18: note = Synthetic
  source 1..18: mol_type = other RNA
ttacttctcccacctgtt

SEQ ID NO: 16487 - RNA, 19 nt, synthetic construct
  misc_feature 1..19: note = Synthetic
  source 1..19: mol_type = other RNA
attacttctcccacctgtt

SEQ ID NO: 16488 - RNA, 21 nt, synthetic construct
  misc_feature 1..21: note = Synthetic
  source 1..21: mol_type = other RNA
ctattacttctcccacctgtt

SEQ ID NO: 16489 - RNA, 22 nt, synthetic construct
  misc_feature 1..22: note = Synthetic
  source 1..22: mol_type = other RNA
actattacttctcccacctgtt

SEQ ID NO: 16490 - RNA, 23 nt, synthetic construct
  misc_feature 1..23: note = Synthetic
  source 1..23: mol_type = other RNA
gactattacttctcccacctgtt

SEQ ID NO: 16491 - RNA, 24 nt, synthetic construct
  misc_feature 1..24: note = Synthetic
  source 1..24: mol_type = other RNA
ggactattacttctcccacctgtt

SEQ ID NO: 16492 - RNA, 18 nt, synthetic construct
  misc_feature 1..18: note = Synthetic
  source 1..18: mol_type = other RNA
gacattcaaggccctgtt

SEQ ID NO: 16493 - RNA, 19 nt, synthetic construct
  misc_feature 1..19: note = Synthetic
  source 1..19: mol_type = other RNA
tgacattcaaggccctgtt

SEQ ID NO: 16494 - RNA, 21 nt, synthetic construct
  misc_feature 1..21: note = Synthetic
  source 1..21: mol_type = other RNA
cgtgacattcaaggccctgtt

SEQ ID NO: 16495 - RNA, 22 nt, synthetic construct
  misc_feature 1..22: note = Synthetic
  source 1..22: mol_type = other RNA
gcgtgacattcaaggccctgtt

SEQ ID NO: 16496 - RNA, 23 nt, synthetic construct
  misc_feature 1..23: note = Synthetic
  source 1..23: mol_type = other RNA
tgcgtgacattcaaggccctgtt

SEQ ID NO: 16497 - RNA, 24 nt, synthetic construct
  misc_feature 1..24: note = Synthetic
  source 1..24: mol_type = other RNA
gtgcgtgacattcaaggccctgtt

SEQ ID NO: 16498 - RNA, 18 nt, synthetic construct
  misc_feature 1..18: note = Synthetic
  source 1..18: mol_type = other RNA
gacacccaggggcgattt

SEQ ID NO: 16499 - RNA, 19 nt, synthetic construct
  misc_feature 1..19: note = Synthetic
  source 1..19: mol_type = other RNA
ggacacccaggggcgattt

SEQ ID NO: 16500 - RNA, 21 nt, synthetic construct
  misc_feature 1..21: note = Synthetic
  source 1..21: mol_type = other RNA
ccggacacccaggggcgattt

SEQ ID NO: 16501 - RNA, 22 nt, synthetic construct
  misc_feature 1..22: note = Synthetic
  source 1..22: mol_type = other RNA
gccggacacccaggggcgattt

SEQ ID NO: 16502 - RNA, 23 nt, synthetic construct
  misc_feature 1..23: note = Synthetic
  source 1..23: mol_type = other RNA
tgccggacacccaggggcgattt

SEQ ID NO: 16503 - RNA, 24 nt, synthetic construct
  misc_feature 1..24: note = Synthetic
  source 1..24: mol_type = other RNA
ctgccggacacccaggggcgattt

SEQ ID NO: 16504 - RNA, 17 nt, synthetic construct
  misc_feature 1..17: note = Synthetic
  source 1..17: mol_type = other RNA
gaccgtcgtgcaccccg

SEQ ID NO: 16505 - RNA, 17 nt, synthetic construct
  misc_feature 1..17: note = Synthetic
  source 1..17: mol_type = other RNA
ggcgctgggttggcccg

SEQ ID NO: 16506 - RNA, 20 nt, synthetic construct
  misc_feature 1..20: note = Synthetic
  source 1..20: mol_type = other RNA
ggtgaccgtcgtgcaccccg

SEQ ID NO: 16507 - RNA, 17 nt, synthetic construct
  misc_feature 1..17: note = Synthetic
  source 1..17: mol_type = other RNA
tcctccgcgtcgggtcg

SEQ ID NO: 16508 - RNA, 17 nt, synthetic construct
  misc_feature 1..17: note = Synthetic
  source 1..17: mol_type = other RNA
cgcagtacaccttgggg

SEQ ID NO: 16509 - RNA, 20 nt, synthetic construct
  misc_feature 1..20: note = Synthetic
  source 1..20: mol_type = other RNA
tatggcgctgggttggcccg

SEQ ID NO: 16510 - RNA, 20 nt, synthetic construct
  misc_feature 1..20: note = Synthetic
  source 1..20: mol_type = other RNA
acgtcctccgcgtcgggtcg

SEQ ID NO: 16511 - RNA, 20 nt, synthetic construct
  misc_feature 1..20: note = Synthetic
  source 1..20: mol_type = other RNA
ccccgcagtacaccttgggg

SEQ ID NO: 16512 - RNA, 17 nt, synthetic construct
  misc_feature 1..17: note = Synthetic
  source 1..17: mol_type = other RNA
tcatccaggcccacaac

SEQ ID NO: 16513 - RNA, 17 nt, synthetic construct
  misc_feature 1..17: note = Synthetic
  source 1..17: mol_type = other RNA
caggtacgacagcacac

SEQ ID NO: 16514 - RNA, 17 nt, synthetic construct
  misc_feature 1..17: note = Synthetic
  source 1..17: mol_type = other RNA
cggccagctcggacacc

SEQ ID NO: 16515 - RNA, 17 nt, synthetic construct
  misc_feature 1..17: note = Synthetic
  source 1..17: mol_type = other RNA
cgaccttgatggcggcc

SEQ ID NO: 16516 - RNA, 17 nt, synthetic construct
  misc_feature 1..17: note = Synthetic
  source 1..17: mol_type = other RNA
cctcccgggctgcggcc

SEQ ID NO: 16517 - RNA, 17 nt, synthetic construct
  misc_feature 1..17: note = Synthetic
  source 1..17: mol_type = other RNA
ggaccttgtaaatgtcc

SEQ ID NO: 16518 - RNA, 17 nt, synthetic construct
  misc_feature 1..17: note = Synthetic
  source 1..17: mol_type = other RNA
ttttcttggcgatcagc

SEQ ID NO: 16519 - RNA, 17 nt, synthetic construct
  misc_feature 1..17: note = Synthetic
  source 1..17: mol_type = other RNA
taccggcatacaagctc

SEQ ID NO: 16520 - RNA, 17 nt, synthetic construct
  misc_feature 1..17: note = Synthetic
  source 1..17: mol_type = other RNA
tggagctctcggccgtc

SEQ ID NO: 16521 - RNA, 17 nt, synthetic construct
  misc_feature 1..17: note = Synthetic
  source 1..17: mol_type = other RNA
ttcttcttgtccttcag

SEQ ID NO: 16522 - RNA, 17 nt, synthetic construct
  misc_feature 1..17: note = Synthetic
  source 1..17: mol_type = other RNA
ggggaatccgcgagcgg

SEQ ID NO: 16523 - RNA, 17 nt, synthetic construct
  misc_feature 1..17: note = Synthetic
  source 1..17: mol_type = other RNA
cgttcacctttatcttg

SEQ ID NO: 16524 - RNA, 20 nt, synthetic construct
  misc_feature 1..20: note = Synthetic
  source 1..20: mol_type = other RNA
gcatcatccaggcccacaac

SEQ ID NO: 16525 - RNA, 20 nt, synthetic construct
  misc_feature 1..20: note = Synthetic
  source 1..20: mol_type = other RNA
gcacaggtacgacagcacac

SEQ ID NO: 16526 - RNA, 20 nt, synthetic construct
  misc_feature 1..20: note = Synthetic
  source 1..20: mol_type = other RNA
cctcggccagctcggacacc

SEQ ID NO: 16527 - RNA, 20 nt, synthetic construct
  misc_feature 1..20: note = Synthetic
  source 1..20: mol_type = other RNA
acacgaccttgatggcggcc

SEQ ID NO: 16528 - RNA, 20 nt, synthetic construct
  misc_feature 1..20: note = Synthetic
  source 1..20: mol_type = other RNA
cgtcctcccgggctgcggcc

SEQ ID NO: 16529 - RNA, 20 nt, synthetic construct
  misc_feature 1..20: note = Synthetic
  source 1..20: mol_type = other RNA
gggggaccttgtaaatgtcc

SEQ ID NO: 16530 - RNA, 20 nt, synthetic construct
  misc_feature 1..20: note = Synthetic
  source 1..20: mol_type = other RNA
actttttcttggcgatcagc

SEQ ID NO: 16531 - RNA, 20 nt, synthetic construct
  misc_feature 1..20: note = Synthetic
  source 1..20: mol_type = other RNA
acctaccggcatacaagctc

SEQ ID NO: 16532 - RNA, 20 nt, synthetic construct
  misc_feature 1..20: note = Synthetic
  source 1..20: mol_type = other RNA
atctggagctctcggccgtc

SEQ ID NO: 16533 - RNA, 20 nt, synthetic construct
  misc_feature 1..20: note = Synthetic
  source 1..20: mol_type = other RNA
tccttcttcttgtccttcag

SEQ ID NO: 16534 - RNA, 20 nt, synthetic construct
  misc_feature 1..20: note = Synthetic
  source 1..20: mol_type = other RNA
tctggggaatccgcgagcgg

SEQ ID NO: 16535 - RNA, 20 nt, synthetic construct
  misc_feature 1..20: note = Synthetic
  source 1..20: mol_type = other RNA
tgccgttcacctttatcttg

SEQ ID NO: 16536 - RNA, 17 nt, synthetic construct
  misc_feature 1..17: note = Synthetic
  source 1..17: mol_type = other RNA
gagctatcgaaccgtgt

SEQ ID NO: 16537 - RNA, 20 nt, synthetic construct
  misc_feature 1..20: note = Synthetic
  source 1..20: mol_type = other RNA
gaccaagaggtccattgggt

SEQ ID NO: 16538 - RNA, 20 nt, synthetic construct
  misc_feature 1..20: note = Synthetic
  source 1..20: mol_type = other RNA
ggagagctatcgaaccgtgt

SEQ ID NO: 16539 - RNA, 17 nt, synthetic construct
  misc_feature 1..17: note = Synthetic
  source 1..17: mol_type = other RNA
tcgaccaagaggtccat

SEQ ID NO: 16540 - RNA, 17 nt, synthetic construct
  misc_feature 1..17: note = Synthetic
  source 1..17: mol_type = other RNA
cgaccaagaggtccatt

SEQ ID NO: 16541 - RNA, 20 nt, synthetic construct
  misc_feature 1..20: note = Synthetic
  source 1..20: mol_type = other RNA
cccgtatcaaccccacccaa

SEQ ID NO: 16542 - RNA, 20 nt, synthetic construct
  misc_feature 1..20: note = Synthetic
  source 1..20: mol_type = other RNA
tccattgggtggggttgata

SEQ ID NO: 16543 - RNA, 20 nt, synthetic construct
  misc_feature 1..20: note = Synthetic
  source 1..20: mol_type = other RNA
cgaccaagaggtccattggg

SEQ ID NO: 16544 - RNA, 20 nt, synthetic construct
  misc_feature 1..20: note = Synthetic
  source 1..20: mol_type = other RNA
accaagaggtccattgggtg

SEQ ID NO: 16545 - RNA, 20 nt, synthetic construct
  misc_feature 1..20: note = Synthetic
  source 1..20: mol_type = other RNA
tcgtcgaccaagaggtccat

SEQ ID NO: 16546 - RNA, 20 nt, synthetic construct
  misc_feature 1..20: note = Synthetic
  source 1..20: mol_type = other RNA
accccacccaatggacctct

SEQ ID NO: 16547 - RNA, 20 nt, synthetic construct
  misc_feature 1..20: note = Synthetic
  source 1..20: mol_type = other RNA
cgtcgaccaagaggtccatt

SEQ ID NO: 16548 - RNA, 17 nt, synthetic construct
  misc_feature 1..17: note = Synthetic
  source 1..17: mol_type = other RNA
gtatcaaccccacccaa

SEQ ID NO: 16549 - RNA, 17 nt, synthetic construct
  misc_feature 1..17: note = Synthetic
  source 1..17: mol_type = other RNA
attgggtggggttgata

SEQ ID NO: 16550 - RNA, 17 nt, synthetic construct
  misc_feature 1..17: note = Synthetic
  source 1..17: mol_type = other RNA
ttgggtggggttgatac

SEQ ID NO: 16551 - RNA, 17 nt, synthetic construct
  misc_feature 1..17: note = Synthetic
  source 1..17: mol_type = other RNA
ccaagaggtccattggg

SEQ ID NO: 16552 - RNA, 17 nt, synthetic construct
  misc_feature 1..17: note = Synthetic
  source 1..17: mol_type = other RNA
aagaggtccattgggtg

SEQ ID NO: 16553 - RNA, 17 nt, synthetic construct
  misc_feature 1..17: note = Synthetic
  source 1..17: mol_type = other RNA
ccacccaatggacctct

SEQ ID NO: 16554 - RNA, 17 nt, synthetic construct
  misc_feature 1..17: note = Synthetic
  source 1..17: mol_type = other RNA
caagaggtccattgggt

SEQ ID NO: 16555 - RNA, 20 nt, synthetic construct
  misc_feature 1..20: note = Synthetic
  source 1..20: mol_type = other RNA
ccattgggtggggttgatac

SEQ ID NO: 16556 - RNA, 17 nt, synthetic construct
  misc_feature 1..17: note = Synthetic
  source 1..17: mol_type = other RNA
gacgagtacggtgggta

SEQ ID NO: 16557 - RNA, 17 nt, synthetic construct
  misc_feature 1..17: note = Synthetic
  source 1..17: mol_type = other RNA
tgggtagggggcgcgac

SEQ ID NO: 16558 - RNA, 17 nt, synthetic construct
  misc_feature 1..17: note = Synthetic
  source 1..17: mol_type = other RNA
gacgggggatgcgggtc

SEQ ID NO: 16559 - RNA, 17 nt, synthetic construct
  misc_feature 1..17: note = Synthetic
  source 1..17: mol_type = other RNA
acgagtacggtgggtag

SEQ ID NO: 16560 - RNA, 17 nt, synthetic construct
  misc_feature 1..17: note = Synthetic
  source 1..17: mol_type = other RNA
cgagtacggtgggtagg

SEQ ID NO: 16561 - RNA, 17 nt, synthetic construct
  misc_feature 1..17: note = Synthetic
  source 1..17: mol_type = other RNA
tgacgagtacggtgggt

SEQ ID NO: 16562 - RNA, 20 nt, synthetic construct
  misc_feature 1..20: note = Synthetic
  source 1..20: mol_type = other RNA
attgacgagtacggtgggta

SEQ ID NO: 16563 - RNA, 20 nt, synthetic construct
  misc_feature 1..20: note = Synthetic
  source 1..20: mol_type = other RNA
cggtgggtagggggcgcgac

SEQ ID NO: 16564 - RNA, 20 nt, synthetic construct
  misc_feature 1..20: note = Synthetic
  source 1..20: mol_type = other RNA
ttgacgagtacggtgggtag

SEQ ID NO: 16565 - RNA, 20 nt, synthetic construct
  misc_feature 1..20: note = Synthetic
  source 1..20: mol_type = other RNA
tgacgagtacggtgggtagg

SEQ ID NO: 16566 - RNA, 20 nt, synthetic construct
  misc_feature 1..20: note = Synthetic
  source 1..20: mol_type = other RNA
aattgacgagtacggtgggt

SEQ ID NO: 16567 - RNA, 21 nt, synthetic construct
  misc_feature 1..21: note = Synthetic
  source 1..21: mol_type = other RNA
gctcgtcgaccaagaggtcca

SEQ ID NO: 16568 - RNA, 18 nt, synthetic construct
  misc_feature 1..18: note = Synthetic
  source 1..18: mol_type = other RNA
gtacagcgggggggccgc

SEQ ID NO: 16569 - RNA, 23 nt, synthetic construct
  misc_feature 1..23: note = Synthetic
  source 1..23: mol_type = other RNA
gttgcgtacagcgggggggccgc

SEQ ID NO: 16570 - RNA, 22 nt, synthetic construct
  misc_feature 1..22: note = Synthetic
  source 1..22: mol_type = other RNA
gagggcggcgggggggacgggc

SEQ ID NO: 16571 - RNA, 18 nt, synthetic construct
  misc_feature 1..18: note = Synthetic
  source 1..18: mol_type = other RNA
ggccacgtcgccgtgggc

SEQ ID NO: 16572 - RNA, 21 nt, synthetic construct
  misc_feature 1..21: note = Synthetic
  source 1..21: mol_type = other RNA
gaaggccacgtcgccgtgggc

SEQ ID NO: 16573 - RNA, 22 nt, synthetic construct
  misc_feature 1..22: note = Synthetic
  source 1..22: mol_type = other RNA
ggaaggccacgtcgccgtgggc

SEQ ID NO: 16574 - RNA, 23 nt, synthetic construct
  misc_feature 1..23: note = Synthetic
  source 1..23: mol_type = other RNA
gggaaggccacgtcgccgtgggc

SEQ ID NO: 16575 - RNA, 18 nt, synthetic construct
  misc_feature 1..18: note = Synthetic
  source 1..18: mol_type = other RNA
gtagagcccgaggccgtc

SEQ ID NO: 16576 - RNA, 21 nt, synthetic construct
  misc_feature 1..21: note = Synthetic
  source 1..21: mol_type = other RNA
gtagtagagcccgaggccgtc

SEQ ID NO: 16577 - RNA, 19 nt, synthetic construct
  misc_feature 1..19: note = Synthetic
  source 1..19: mol_type = other RNA
gaccaagaggtccattggg

SEQ ID NO: 16578 - RNA, 22 nt, synthetic construct
  misc_feature 1..22: note = Synthetic
  source 1..22: mol_type = other RNA
gtcgaccaagaggtccattggg

SEQ ID NO: 16579 - RNA, 18 nt, synthetic construct
  misc_feature 1..18: note = Synthetic
  source 1..18: mol_type = other RNA
gtgggcgcgaatgtcgat

SEQ ID NO: 16580 - RNA, 21 nt, synthetic construct
  misc_feature 1..21: note = Synthetic
  source 1..21: mol_type = other RNA
gccgtgggcgcgaatgtcgat

SEQ ID NO: 16581 - RNA, 24 nt, synthetic construct
  misc_feature 1..24: note = Synthetic
  source 1..24: mol_type = other RNA
gtcgccgtgggcgcgaatgtcgat

SEQ ID NO: 16582 - RNA, 23 nt, synthetic construct
  misc_feature 1..23: note = Synthetic
  source 1..23: mol_type = other RNA
gtaccatgctcgatacctggaac

SEQ ID NO: 16583 - RNA, 18 nt, synthetic construct
  misc_feature 1..18: note = Synthetic
  source 1..18: mol_type = other RNA
cgtcgaccaagaggtcca

SEQ ID NO: 16584 - RNA, 19 nt, synthetic construct
  misc_feature 1..19: note = Synthetic
  source 1..19: mol_type = other RNA
tcgtcgaccaagaggtcca

SEQ ID NO: 16585 - RNA, 20 nt, synthetic construct
  misc_feature 1..20: note = Synthetic
  source 1..20: mol_type = other RNA
ctcgtcgaccaagaggtcca

SEQ ID NO: 16586 - RNA, 22 nt, synthetic construct
  misc_feature 1..22: note = Synthetic
  source 1..22: mol_type = other RNA
agctcgtcgaccaagaggtcca

SEQ ID NO: 16587 - RNA, 23 nt, synthetic construct
  misc_feature 1..23: note = Synthetic
  source 1..23: mol_type = other RNA
cagctcgtcgaccaagaggtcca

SEQ ID NO: 16588 - RNA, 24 nt, synthetic construct
  misc_feature 1..24: note = Synthetic
  source 1..24: mol_type = other RNA
acagctcgtcgaccaagaggtcca

SEQ ID NO: 16589 - RNA, 19 nt, synthetic construct
  misc_feature 1..19: note = Synthetic
  source 1..19: mol_type = other RNA
cgtacagcgggggggccgc

SEQ ID NO: 16590 - RNA, 21 nt, synthetic construct
  misc_feature 1..21: note = Synthetic
  source 1..21: mol_type = other RNA
tgcgtacagcgggggggccgc

SEQ ID NO: 16591 - RNA, 22 nt, synthetic construct
  misc_feature 1..22: note = Synthetic
  source 1..22: mol_type = other RNA
ttgcgtacagcgggggggccgc

SEQ ID NO: 16592 - RNA, 24 nt, synthetic construct
  misc_feature 1..24: note = Synthetic
  source 1..24: mol_type = other RNA
cgttgcgtacagcgggggggccgc

SEQ ID NO: 16593 - RNA, 21 nt, synthetic construct
  misc_feature 1..21: note = Synthetic
  source 1..21: mol_type = other RNA
agggcggcgggggggacgggc

SEQ ID NO: 16594 - RNA, 23 nt, synthetic construct
  misc_feature 1..23: note = Synthetic
  source 1..23: mol_type = other RNA
agagggcggcgggggggacgggc

SEQ ID NO: 16595 - RNA, 24 nt, synthetic construct
  misc_feature 1..24: note = Synthetic
  source 1..24: mol_type = other RNA
aagagggcggcgggggggacgggc

SEQ ID NO: 16596 - RNA, 19 nt, synthetic construct
  misc_feature 1..19: note = Synthetic
  source 1..19: mol_type = other RNA
aggccacgtcgccgtgggc

SEQ ID NO: 16597 - RNA, 24 nt, synthetic construct
  misc_feature 1..24: note = Synthetic
  source 1..24: mol_type = other RNA
agggaaggccacgtcgccgtgggc

SEQ ID NO: 16598 - RNA, 19 nt, synthetic construct
  misc_feature 1..19: note = Synthetic
  source 1..19: mol_type = other RNA
agtagagcccgaggccgtc

SEQ ID NO: 16599 - RNA, 22 nt, synthetic construct
  misc_feature 1..22: note = Synthetic
  source 1..22: mol_type = other RNA
cgtagtagagcccgaggccgtc

SEQ ID NO: 16600 - RNA, 23 nt, synthetic construct
  misc_feature 1..23: note = Synthetic
  source 1..23: mol_type = other RNA
tcgtagtagagcccgaggccgtc

SEQ ID NO: 16601 - RNA, 24 nt, synthetic construct
  misc_feature 1..24: note = Synthetic
  source 1..24: mol_type = other RNA
ttcgtagtagagcccgaggccgtc

SEQ ID NO: 16602 - RNA, 18 nt, synthetic construct
  misc_feature 1..18: note = Synthetic
  source 1..18: mol_type = other RNA
accaagaggtccattggg

SEQ ID NO: 16603 - RNA, 21 nt, synthetic construct
  misc_feature 1..21: note = Synthetic
  source 1..21: mol_type = other RNA
tcgaccaagaggtccattggg

SEQ ID NO: 16604 - RNA, 23 nt, synthetic construct
  misc_feature 1..23: note = Synthetic
  source 1..23: mol_type = other RNA
cgtcgaccaagaggtccattggg

SEQ ID NO: 16605 - RNA, 24 nt, synthetic construct
  misc_feature 1..24: note = Synthetic
  source 1..24: mol_type = other RNA
tcgtcgaccaagaggtccattggg

SEQ ID NO: 16606 - RNA, 19 nt, synthetic construct
  misc_feature 1..19: note = Synthetic
  source 1..19: mol_type = other RNA
cgtgggcgcgaatgtcgat

SEQ ID NO: 16607 - RNA, 22 nt, synthetic construct
  misc_feature 1..22: note = Synthetic
  source 1..22: mol_type = other RNA
cgccgtgggcgcgaatgtcgat

SEQ ID NO: 16608 - RNA, 23 nt, synthetic construct
  misc_feature 1..23: note = Synthetic
  source 1..23: mol_type = other RNA
tcgccgtgggcgcgaatgtcgat

SEQ ID NO: 16609 - RNA, 21 nt, synthetic construct
  misc_feature 1..21: note = Synthetic
  source 1..21: mol_type = other RNA
acatcgctgggcagcgttgat

SEQ ID NO: 16610 - RNA, 22 nt, synthetic construct
  misc_feature 1..22: note = Synthetic
  source 1..22: mol_type = other RNA
cacatcgctgggcagcgttgat

SEQ ID NO: 16611 - RNA, 23 nt, synthetic construct
  misc_feature 1..23: note = Synthetic
  source 1..23: mol_type = other RNA
ccacatcgctgggcagcgttgat

SEQ ID NO: 16612 - RNA, 24 nt, synthetic construct
  misc_feature 1..24: note = Synthetic
  source 1..24: mol_type = other RNA
accacatcgctgggcagcgttgat

SEQ ID NO: 16613 - RNA, 18 nt, synthetic construct
  misc_feature 1..18: note = Synthetic
  source 1..18: mol_type = other RNA
atgctcgatacctggaac

SEQ ID NO: 16614 - RNA, 19 nt, synthetic construct
  misc_feature 1..19: note = Synthetic
  source 1..19: mol_type = other RNA
catgctcgatacctggaac

SEQ ID NO: 16615 - RNA, 21 nt, synthetic construct
  misc_feature 1..21: note = Synthetic
  source 1..21: mol_type = other RNA
accatgctcgatacctggaac

SEQ ID NO: 16616 - RNA, 22 nt, synthetic construct
  misc_feature 1..22: note = Synthetic
  source 1..22: mol_type = other RNA
taccatgctcgatacctggaac

SEQ ID NO: 16617 - RNA, 24 nt, synthetic construct
  misc_feature 1..24: note = Synthetic
  source 1..24: mol_type = other RNA
tgtaccatgctcgatacctggaac

SEQ ID NO: 16618 - RNA, 21 nt, synthetic construct
  misc_feature 1..21: note = Synthetic
  source 1..21: mol_type = other RNA
cgaccaacgccgacctgtacc

SEQ ID NO: 16619 - RNA, 22 nt, synthetic construct
  misc_feature 1..22: note = Synthetic
  source 1..22: mol_type = other RNA
ccgaccaacgccgacctgtacc

SEQ ID NO: 16620 - RNA, 23 nt, synthetic construct
  misc_feature 1..23: note = Synthetic
  source 1..23: mol_type = other RNA
accgaccaacgccgacctgtacc

SEQ ID NO: 16621 - RNA, 24 nt, synthetic construct
  misc_feature 1..24: note = Synthetic
  source 1..24: mol_type = other RNA
taccgaccaacgccgacctgtacc

SEQ ID NO: 16622 - RNA, 21 nt, synthetic construct
  misc_feature 1..21: note = Synthetic
  source 1..21: mol_type = other RNA
caacgctgcccagcgatgtgg

SEQ ID NO: 16623 - RNA, 22 nt, synthetic construct
  misc_feature 1..22: note = Synthetic
  source 1..22: mol_type = other RNA
tcaacgctgcccagcgatgtgg

SEQ ID NO: 16624 - RNA, 23 nt, synthetic construct
  misc_feature 1..23: note = Synthetic
  source 1..23: mol_type = other RNA
atcaacgctgcccagcgatgtgg

SEQ ID NO: 16625 - RNA, 24 nt, synthetic construct
  misc_feature 1..24: note = Synthetic
  source 1..24: mol_type = other RNA
tatcaacgctgcccagcgatgtgg

SEQ ID NO: 16626 - RNA, 18 nt, synthetic construct
  misc_feature 1..18: note = Synthetic
  source 1..18: mol_type = other RNA
gcggcgggggggacgggc

SEQ ID NO: 16627 - RNA, 19 nt, synthetic construct
  misc_feature 1..19: note = Synthetic
  source 1..19: mol_type = other RNA
ggcggcgggggggacgggc

SEQ ID NO: 16628 - RNA, 18 nt, synthetic construct
  misc_feature 1..18: note = Synthetic
  source 1..18: mol_type = other RNA
tcgctgggcagcgttgat

SEQ ID NO: 16629 - RNA, 19 nt, synthetic construct
  misc_feature 1..19: note = Synthetic
  source 1..19: mol_type = other RNA
atcgctgggcagcgttgat

SEQ ID NO: 16630 - RNA, 18 nt, synthetic construct
  misc_feature 1..18: note = Synthetic
  source 1..18: mol_type = other RNA
ccaacgccgacctgtacc

SEQ ID NO: 16631 - RNA, 19 nt, synthetic construct
  misc_feature 1..19: note = Synthetic
  source 1..19: mol_type = other RNA
accaacgccgacctgtacc

SEQ ID NO: 16632 - RNA, 18 nt, synthetic construct
  misc_feature 1..18: note = Synthetic
  source 1..18: mol_type = other RNA
ccgcccccccgcccggcc

SEQ ID NO: 16633 - RNA, 19 nt, synthetic construct
  misc_feature 1..19: note = Synthetic
  source 1..19: mol_type = other RNA
accgcccccccgcccggcc

SEQ ID NO: 16634 - RNA, 21 nt, synthetic construct
  misc_feature 1..21: note = Synthetic
  source 1..21: mol_type = other RNA
ccaccgcccccccgcccggcc

SEQ ID NO: 16635 - RNA, 22 nt, synthetic construct
  misc_feature 1..22: note = Synthetic
  source 1..22: mol_type = other RNA
gccaccgcccccccgcccggcc

SEQ ID NO: 16636 - RNA, 23 nt, synthetic construct
  misc_feature 1..23: note = Synthetic
  source 1..23: mol_type = other RNA
cgccaccgcccccccgcccggcc

SEQ ID NO: 16637 - RNA, 24 nt, synthetic construct
  misc_feature 1..24: note = Synthetic
  source 1..24: mol_type = other RNA
tcgccaccgcccccccgcccggcc

SEQ ID NO: 16638 - RNA, 18 nt, synthetic construct
  misc_feature 1..18: note = Synthetic
  source 1..18: mol_type = other RNA
cgctgcccagcgatgtgg

SEQ ID NO: 16639 - RNA, 19 nt, synthetic construct
  misc_feature 1..19: note = Synthetic
  source 1..19: mol_type = other RNA
acgctgcccagcgatgtgg

SEQ ID NO: 16640 - RNA, 18 nt, synthetic construct
  misc_feature 1..18: note = Synthetic
  source 1..18: mol_type = other RNA
gtcgaggagacggttaaa

SEQ ID NO: 16641 - RNA, 19 nt, synthetic construct
  misc_feature 1..19: note = Synthetic
  source 1..19: mol_type = other RNA
cgtcgaggagacggttaaa

SEQ ID NO: 16642 - RNA, 21 nt, synthetic construct
  misc_feature 1..21: note = Synthetic
  source 1..21: mol_type = other RNA
gtcgtcgaggagacggttaaa

SEQ ID NO: 16643 - RNA, 22 nt, synthetic construct
  misc_feature 1..22: note = Synthetic
  source 1..22: mol_type = other RNA
agtcgtcgaggagacggttaaa

SEQ ID NO: 16644 - RNA, 23 nt, synthetic construct
  misc_feature 1..23: note = Synthetic
  source 1..23: mol_type = other RNA
aagtcgtcgaggagacggttaaa

SEQ ID NO: 16645 - RNA, 24 nt, synthetic construct
  misc_feature 1..24: note = Synthetic
  source 1..24: mol_type = other RNA
caagtcgtcgaggagacggttaaa

SEQ ID NO: 16646 - RNA, 18 nt, synthetic construct
  misc_feature 1..18: note = Synthetic
  source 1..18: mol_type = other RNA
tagctcggcgtggaagaa

SEQ ID NO: 16647 - RNA, 19 nt, synthetic construct
  misc_feature 1..19: note = Synthetic
  source 1..19: mol_type = other RNA
gtagctcggcgtggaagaa

SEQ ID NO: 16648 - RNA, 21 nt, synthetic construct
  misc_feature 1..21: note = Synthetic
  source 1..21: mol_type = other RNA
ccgtagctcggcgtggaagaa

SEQ ID NO: 16649 - RNA, 22 nt, synthetic construct
  misc_feature 1..22: note = Synthetic
  source 1..22: mol_type = other RNA
cccgtagctcggcgtggaagaa

SEQ ID NO: 16650 - RNA, 23 nt, synthetic construct
  misc_feature 1..23: note = Synthetic
  source 1..23: mol_type = other RNA
gcccgtagctcggcgtggaagaa

SEQ ID NO: 16651 - RNA, 24 nt, synthetic construct
  misc_feature 1..24: note = Synthetic
  source 1..24: mol_type = other RNA
cgcccgtagctcggcgtggaagaa

SEQ ID NO: 16652 - RNA, 18 nt, synthetic construct
  misc_feature 1..18: note = Synthetic
  source 1..18: mol_type = other RNA
ggcgccccgttgcgtaca

SEQ ID NO: 16653 - RNA, 19 nt, synthetic construct
  misc_feature 1..19: note = Synthetic
  source 1..19: mol_type = other RNA
aggcgccccgttgcgtaca

SEQ ID NO: 16654 - RNA, 21 nt, synthetic construct
  misc_feature 1..21: note = Synthetic
  source 1..21: mol_type = other RNA
tcaggcgccccgttgcgtaca

SEQ ID NO: 16655 - RNA, 22 nt, synthetic construct
  misc_feature 1..22: note = Synthetic
  source 1..22: mol_type = other RNA
ctcaggcgccccgttgcgtaca

SEQ ID NO: 16656 - RNA, 23 nt, synthetic construct
  misc_feature 1..23: note = Synthetic
  source 1..23: mol_type = other RNA
gctcaggcgccccgttgcgtaca

SEQ ID NO: 16657 - RNA, 24 nt, synthetic construct
  misc_feature 1..24: note = Synthetic
  source 1..24: mol_type = other RNA
ggctcaggcgccccgttgcgtaca

SEQ ID NO: 16658 - RNA, 18 nt, synthetic construct
  misc_feature 1..18: note = Synthetic
  source 1..18: mol_type = other RNA
tcggcgtggaagaaacga

SEQ ID NO: 16659 - RNA, 19 nt, synthetic construct
  misc_feature 1..19: note = Synthetic
  source 1..19: mol_type = other RNA
ctcggcgtggaagaaacga

SEQ ID NO: 16660 - RNA, 21 nt, synthetic construct
  misc_feature 1..21: note = Synthetic
  source 1..21: mol_type = other RNA
agctcggcgtggaagaaacga

SEQ ID NO: 16661 - RNA, 22 nt, synthetic construct
  misc_feature 1..22: note = Synthetic
  source 1..22: mol_type = other RNA
tagctcggcgtggaagaaacga

SEQ ID NO: 16662 - RNA, 23 nt, synthetic construct
  misc_feature 1..23: note = Synthetic
  source 1..23: mol_type = other RNA
gtagctcggcgtggaagaaacga

SEQ ID NO: 16663 - RNA, 24 nt, synthetic construct
  misc_feature 1..24: note = Synthetic
  source 1..24: mol_type = other RNA
cgtagctcggcgtggaagaaacga

SEQ ID NO: 16664 - RNA, 18 nt, synthetic construct
  misc_feature 1..18: note = Synthetic
  source 1..18: mol_type = other RNA
atcgctgggcagcgttga

SEQ ID NO: 16665 - RNA, 19 nt, synthetic construct
  misc_feature 1..19: note = Synthetic
  source 1..19: mol_type = other RNA
catcgctgggcagcgttga

SEQ ID NO: 16666 - RNA, 21 nt, synthetic construct
  misc_feature 1..21: note = Synthetic
  source 1..21: mol_type = other RNA
cacatcgctgggcagcgttga

SEQ ID NO: 16667 - RNA, 22 nt, synthetic construct
  misc_feature 1..22: note = Synthetic
  source 1..22: mol_type = other RNA
ccacatcgctgggcagcgttga

SEQ ID NO: 16668 - RNA, 23 nt, synthetic construct
  misc_feature 1..23: note = Synthetic
  source 1..23: mol_type = other RNA
accacatcgctgggcagcgttga

SEQ ID NO: 16669 - RNA, 24 nt, synthetic construct
  misc_feature 1..24: note = Synthetic
  source 1..24: mol_type = other RNA
caccacatcgctgggcagcgttga

SEQ ID NO: 16670 - RNA, 18 nt, synthetic construct
  misc_feature 1..18: note = Synthetic
  source 1..18: mol_type = other RNA
cattgggtggggttgata

SEQ ID NO: 16671 - RNA, 19 nt, synthetic construct
  misc_feature 1..19: note = Synthetic
  source 1..19: mol_type = other RNA
ccattgggtggggttgata

SEQ ID NO: 16672 - RNA, 21 nt, synthetic construct
  misc_feature 1..21: note = Synthetic
  source 1..21: mol_type = other RNA
gtccattgggtggggttgata

SEQ ID NO: 16673 - RNA, 22 nt, synthetic construct
  misc_feature 1..22: note = Synthetic
  source 1..22: mol_type = other RNA
ggtccattgggtggggttgata

SEQ ID NO: 16674 - RNA, 23 nt, synthetic construct
  misc_feature 1..23: note = Synthetic
  source 1..23: mol_type = other RNA
aggtccattgggtggggttgata

SEQ ID NO: 16675 - RNA, 24 nt, synthetic construct
  misc_feature 1..24: note = Synthetic
  source 1..24: mol_type = other RNA
gaggtccattgggtggggttgata

SEQ ID NO: 16676 - RNA, 18 nt, synthetic construct
  misc_feature 1..18: note = Synthetic
  source 1..18: mol_type = other RNA
cgggtggccggaagcgta

SEQ ID NO: 16677 - RNA, 19 nt, synthetic construct
  misc_feature 1..19: note = Synthetic
  source 1..19: mol_type = other RNA
gcgggtggccggaagcgta

SEQ ID NO: 16678 - RNA, 21 nt, synthetic construct
  misc_feature 1..21: note = Synthetic
  source 1..21: mol_type = other RNA
tcgcgggtggccggaagcgta

SEQ ID NO: 16679 - RNA, 22 nt, synthetic construct
  misc_feature 1..22: note = Synthetic
  source 1..22: mol_type = other RNA
gtcgcgggtggccggaagcgta

SEQ ID NO: 16680 - RNA, 23 nt, synthetic construct
  misc_feature 1..23: note = Synthetic
  source 1..23: mol_type = other RNA
cgtcgcgggtggccggaagcgta

SEQ ID NO: 16681 - RNA, 24 nt, synthetic construct
  misc_feature 1..24: note = Synthetic
  source 1..24: mol_type = other RNA
ccgtcgcgggtggccggaagcgta

SEQ ID NO: 16682 - RNA, 18 nt, synthetic construct
  misc_feature 1..18: note = Synthetic
  source 1..18: mol_type = other RNA
agatcctcgttccaggta

SEQ ID NO: 16683 - RNA, 19 nt, synthetic construct
  misc_feature 1..19: note = Synthetic
  source 1..19: mol_type = other RNA
cagatcctcgttccaggta

SEQ ID NO: 16684 - RNA, 21 nt, synthetic construct
  misc_feature 1..21: note = Synthetic
  source 1..21: mol_type = other RNA
aacagatcctcgttccaggta

SEQ ID NO: 16685 - RNA, 22 nt, synthetic construct
  misc_feature 1..22: note = Synthetic
  source 1..22: mol_type = other RNA
aaacagatcctcgttccaggta

SEQ ID NO: 16686 - RNA, 23 nt, synthetic construct
  misc_feature 1..23: note = Synthetic
  source 1..23: mol_type = other RNA
aaaacagatcctcgttccaggta

SEQ ID NO: 16687 - RNA, 24 nt, synthetic construct
  misc_feature 1..24: note = Synthetic
  source 1..24: mol_type = other RNA
gaaaacagatcctcgttccaggta

SEQ ID NO: 16688 - RNA, 18 nt, synthetic construct
  misc_feature 1..18: note = Synthetic
  source 1..18: mol_type = other RNA
tcgtcgaggagacggtta

SEQ ID NO: 16689 - RNA, 19 nt, synthetic construct
  misc_feature 1..19: note = Synthetic
  source 1..19: mol_type = other RNA
gtcgtcgaggagacggtta

SEQ ID NO: 16690 - RNA, 21 nt, synthetic construct
  misc_feature 1..21: note = Synthetic
  source 1..21: mol_type = other RNA
aagtcgtcgaggagacggtta

SEQ ID NO: 16691 - RNA, 22 nt, synthetic construct
  misc_feature 1..22: note = Synthetic
  source 1..22: mol_type = other RNA
caagtcgtcgaggagacggtta

SEQ ID NO: 16692 - RNA, 23 nt, synthetic construct
  misc_feature 1..23: note = Synthetic
  source 1..23: mol_type = other RNA
ccaagtcgtcgaggagacggtta

SEQ ID NO: 16693 - RNA, 24 nt, synthetic construct
  misc_feature 1..24: note = Synthetic
  source 1..24: mol_type = other RNA
cccaagtcgtcgaggagacggtta

SEQ ID NO: 16694 - RNA, 18 nt, synthetic construct
  misc_feature 1..18: note = Synthetic
  source 1..18: mol_type = other RNA
gctcggcgtggaagaaac

SEQ ID NO: 16695 - RNA, 19 nt, synthetic construct
  misc_feature 1..19: note = Synthetic
  source 1..19: mol_type = other RNA
agctcggcgtggaagaaac

SEQ ID NO: 16696 - RNA, 21 nt, synthetic construct
  misc_feature 1..21: note = Synthetic
  source 1..21: mol_type = other RNA
gtagctcggcgtggaagaaac

SEQ ID NO: 16697 - RNA, 22 nt, synthetic construct
  misc_feature 1..22: note = Synthetic
  source 1..22: mol_type = other RNA
cgtagctcggcgtggaagaaac

SEQ ID NO: 16698 - RNA, 23 nt, synthetic construct
  misc_feature 1..23: note = Synthetic
  source 1..23: mol_type = other RNA
ccgtagctcggcgtggaagaaac

SEQ ID NO: 16699 - RNA, 24 nt, synthetic construct
  misc_feature 1..24: note = Synthetic
  source 1..24: mol_type = other RNA
cccgtagctcggcgtggaagaaac

SEQ ID NO: 16700 - RNA, 18 nt, synthetic construct
  misc_feature 1..18: note = Synthetic
  source 1..18: mol_type = other RNA
attgggtggggttgatac

SEQ ID NO: 16701 - RNA, 19 nt, synthetic construct
  misc_feature 1..19: note = Synthetic
  source 1..19: mol_type = other RNA
cattgggtggggttgatac

SEQ ID NO: 16702 - RNA, 21 nt, synthetic construct
  misc_feature 1..21: note = Synthetic
  source 1..21: mol_type = other RNA
tccattgggtggggttgatac

SEQ ID NO: 16703 - RNA, 22 nt, synthetic construct
  misc_feature 1..22: note = Synthetic
  source 1..22: mol_type = other RNA
gtccattgggtggggttgatac

SEQ ID NO: 16704 - RNA, 23 nt, synthetic construct
  misc_feature 1..23: note = Synthetic
  source 1..23: mol_type = other RNA
ggtccattgggtggggttgatac

SEQ ID NO: 16705 - RNA, 24 nt, synthetic construct
  misc_feature 1..24: note = Synthetic
  source 1..24: mol_type = other RNA
aggtccattgggtggggttgatac

SEQ ID NO: 16706 - RNA, 18 nt, synthetic construct
  misc_feature 1..18: note = Synthetic
  source 1..18: mol_type = other RNA
gcaaacagctcgtcgacc

SEQ ID NO: 16707 - RNA, 19 nt, synthetic construct
  misc_feature 1..19: note = Synthetic
  source 1..19: mol_type = other RNA
ggcaaacagctcgtcgacc

SEQ ID NO: 16708 - RNA, 21 nt, synthetic construct
  misc_feature 1..21: note = Synthetic
  source 1..21: mol_type = other RNA
tcggcaaacagctcgtcgacc

SEQ ID NO: 16709 - RNA, 22 nt, synthetic construct
  misc_feature 1..22: note = Synthetic
  source 1..22: mol_type = other RNA
gtcggcaaacagctcgtcgacc

SEQ ID NO: 16710 - RNA, 23 nt, synthetic construct
  misc_feature 1..23: note = Synthetic
  source 1..23: mol_type = other RNA
tgtcggcaaacagctcgtcgacc

SEQ ID NO: 16711 - RNA, 24 nt, synthetic construct
  misc_feature 1..24: note = Synthetic
  source 1..24: mol_type = other RNA
atgtcggcaaacagctcgtcgacc

SEQ ID NO: 16712 - RNA, 18 nt, synthetic construct
  misc_feature 1..18: note = Synthetic
  source 1..18: mol_type = other RNA
agggaaggccacgtcgcc

SEQ ID NO: 16713 - RNA, 19 nt, synthetic construct
  misc_feature 1..19: note = Synthetic
  source 1..19: mol_type = other RNA
tagggaaggccacgtcgcc

SEQ ID NO: 16714 - RNA, 21 nt, synthetic construct
  misc_feature 1..21: note = Synthetic
  source 1..21: mol_type = other RNA
cgtagggaaggccacgtcgcc

SEQ ID NO: 16715 - RNA, 22 nt, synthetic construct
  misc_feature 1..22: note = Synthetic
  source 1..22: mol_type = other RNA
gcgtagggaaggccacgtcgcc

SEQ ID NO: 16716 - RNA, 23 nt, synthetic construct
  misc_feature 1..23: note = Synthetic
  source 1..23: mol_type = other RNA
agcgtagggaaggccacgtcgcc

SEQ ID NO: 16717 - RNA, 24 nt, synthetic construct
  misc_feature 1..24: note = Synthetic
  source 1..24: mol_type = other RNA
aagcgtagggaaggccacgtcgcc

SEQ ID NO: 16718 - RNA, 18 nt, synthetic construct
  misc_feature 1..18: note = Synthetic
  source 1..18: mol_type = other RNA
cgccccgttgcgtacagc

SEQ ID NO: 16719 - RNA, 19 nt, synthetic construct
  misc_feature 1..19: note = Synthetic
  source 1..19: mol_type = other RNA
gcgccccgttgcgtacagc

SEQ ID NO: 16720 - RNA, 21 nt, synthetic construct
  misc_feature 1..21: note = Synthetic
  source 1..21: mol_type = other RNA
aggcgccccgttgcgtacagc

SEQ ID NO: 16721 - RNA, 22 nt, synthetic construct
  misc_feature 1..22: note = Synthetic
  source 1..22: mol_type = other RNA
caggcgccccgttgcgtacagc

SEQ ID NO: 16722 - RNA, 23 nt, synthetic construct
  misc_feature 1..23: note = Synthetic
  source 1..23: mol_type = other RNA
tcaggcgccccgttgcgtacagc

SEQ ID NO: 16723 - RNA, 24 nt, synthetic construct
  misc_feature 1..24: note = Synthetic
  source 1..24: mol_type = other RNA
ctcaggcgccccgttgcgtacagc

SEQ ID NO: 16724 - RNA, 18 nt, synthetic construct
  misc_feature 1..18: note = Synthetic
  source 1..18: mol_type = other RNA
agcgcttcgtagtagagc

SEQ ID NO: 16725 - RNA, 19 nt, synthetic construct
  misc_feature 1..19: note = Synthetic
  source 1..19: mol_type = other RNA
gagcgcttcgtagtagagc

SEQ ID NO: 16726 - RNA, 21 nt, synthetic construct
  misc_feature 1..21: note = Synthetic
  source 1..21: mol_type = other RNA
gagagcgcttcgtagtagagc

SEQ ID NO: 16727 - RNA, 22 nt, synthetic construct
  misc_feature 1..22: note = Synthetic
  source 1..22: mol_type = other RNA
agagagcgcttcgtagtagagc

SEQ ID NO: 16728 - RNA, 23 nt, synthetic construct
  misc_feature 1..23: note = Synthetic
  source 1..23: mol_type = other RNA
gagagagcgcttcgtagtagagc

SEQ ID NO: 16729 - RNA, 24 nt, synthetic construct
  misc_feature 1..24: note = Synthetic
  source 1..24: mol_type = other RNA
cgagagagcgcttcgtagtagagc

SEQ ID NO: 16730 - RNA, 18 nt, synthetic construct
  misc_feature 1..18: note = Synthetic
  source 1..18: mol_type = other RNA
tcgagcatggtacatagc

SEQ ID NO: 16731 - RNA, 19 nt, synthetic construct
  misc_feature 1..19: note = Synthetic
  source 1..19: mol_type = other RNA
atcgagcatggtacatagc

SEQ ID NO: 16732 - RNA, 21 nt, synthetic construct
  misc_feature 1..21: note = Synthetic
  source 1..21: mol_type = other RNA
gtatcgagcatggtacatagc

SEQ ID NO: 16733 - RNA, 22 nt, synthetic construct
  misc_feature 1..22: note = Synthetic
  source 1..22: mol_type = other RNA
ggtatcgagcatggtacatagc

SEQ ID NO: 16734 - RNA, 23 nt, synthetic construct
  misc_feature 1..23: note = Synthetic
  source 1..23: mol_type = other RNA
aggtatcgagcatggtacatagc

SEQ ID NO: 16735 - RNA, 24 nt, synthetic construct
  misc_feature 1..24: note = Synthetic
  source 1..24: mol_type = other RNA
caggtatcgagcatggtacatagc

SEQ ID NO: 16736 - RNA, 18 nt, synthetic construct
  misc_feature 1..18: note = Synthetic
  source 1..18: mol_type = other RNA
acggttaaagagggcggc

SEQ ID NO: 16737 - RNA, 19 nt, synthetic construct
  misc_feature 1..19: note = Synthetic
  source 1..19: mol_type = other RNA
gacggttaaagagggcggc

SEQ ID NO: 16738 - RNA, 21 nt, synthetic construct
  misc_feature 1..21: note = Synthetic
  source 1..21: mol_type = other RNA
gagacggttaaagagggcggc

SEQ ID NO: 16739 - RNA, 22 nt, synthetic construct
  misc_feature 1..22: note = Synthetic
  source 1..22: mol_type = other RNA
ggagacggttaaagagggcggc

SEQ ID NO: 16740 - RNA, 23 nt, synthetic construct
  misc_feature 1..23: note = Synthetic
  source 1..23: mol_type = other RNA
aggagacggttaaagagggcggc

SEQ ID NO: 16741 - RNA, 24 nt, synthetic construct
  misc_feature 1..24: note = Synthetic
  source 1..24: mol_type = other RNA
gaggagacggttaaagagggcggc

SEQ ID NO: 16742 - RNA, 18 nt, synthetic construct
  misc_feature 1..18: note = Synthetic
  source 1..18: mol_type = other RNA
ccgcgcccgtagctcggc

SEQ ID NO: 16743 - RNA, 19 nt, synthetic construct
  misc_feature 1..19: note = Synthetic
  source 1..19: mol_type = other RNA
cccgcgcccgtagctcggc

SEQ ID NO: 16744 - RNA, 21 nt, synthetic construct
  misc_feature 1..21: note = Synthetic
  source 1..21: mol_type = other RNA
ctcccgcgcccgtagctcggc

SEQ ID NO: 16745 - RNA, 22 nt, synthetic construct
  misc_feature 1..22: note = Synthetic
  source 1..22: mol_type = other RNA
cctcccgcgcccgtagctcggc

SEQ ID NO: 16746 - RNA, 23 nt, synthetic construct
  misc_feature 1..23: note = Synthetic
  source 1..23: mol_type = other RNA
tcctcccgcgcccgtagctcggc

SEQ ID NO: 16747 - RNA, 24 nt, synthetic construct
  misc_feature 1..24: note = Synthetic
  source 1..24: mol_type = other RNA
ctcctcccgcgcccgtagctcggc

SEQ ID NO: 16748 - RNA, 18 nt, synthetic construct
  misc_feature 1..18: note = Synthetic
  source 1..18: mol_type = other RNA
ggcatgggtggggagggc

SEQ ID NO: 16749 - RNA, 19 nt, synthetic construct
  misc_feature 1..19: note = Synthetic
  source 1..19: mol_type = other RNA
gggcatgggtggggagggc

SEQ ID NO: 16750 - RNA, 21 nt, synthetic construct
  misc_feature 1..21: note = Synthetic
  source 1..21: mol_type = other RNA
acgggcatgggtggggagggc

SEQ ID NO: 16751 - RNA, 22 nt, synthetic construct
  misc_feature 1..22: note = Synthetic
  source 1..22: mol_type = other RNA
gacgggcatgggtggggagggc

SEQ ID NO: 16752 - RNA, 23 nt, synthetic construct
  misc_feature 1..23: note = Synthetic
  source 1..23: mol_type = other RNA
ggacgggcatgggtggggagggc

SEQ ID NO: 16753 - RNA, 24 nt, synthetic construct
  misc_feature 1..24: note = Synthetic
  source 1..24: mol_type = other RNA
gggacgggcatgggtggggagggc

SEQ ID NO: 16754 - RNA, 18 nt, synthetic construct
  misc_feature 1..18: note = Synthetic
  source 1..18: mol_type = other RNA
tgggacccccggccgggc

SEQ ID NO: 16755 - RNA, 19 nt, synthetic construct
  misc_feature 1..19: note = Synthetic
  source 1..19: mol_type = other RNA
ttgggacccccggccgggc

SEQ ID NO: 16756 - RNA, 21 nt, synthetic construct
  misc_feature 1..21: note = Synthetic
  source 1..21: mol_type = other RNA
ttttgggacccccggccgggc

SEQ ID NO: 16757 - RNA, 22 nt, synthetic construct
  misc_feature 1..22: note = Synthetic
  source 1..22: mol_type = other RNA
tttttgggacccccggccgggc

SEQ ID NO: 16758 - RNA, 23 nt, synthetic construct
  misc_feature 1..23: note = Synthetic
  source 1..23: mol_type = other RNA
gtttttgggacccccggccgggc

SEQ ID NO: 16759 - RNA, 24 nt, synthetic construct
  misc_feature 1..24: note = Synthetic
  source 1..24: mol_type = other RNA
tgtttttgggacccccggccgggc

SEQ ID NO: 16760 - RNA, 18 nt, synthetic construct
  misc_feature 1..18: note = Synthetic
  source 1..18: mol_type = other RNA
gaggccgtcgcgggtggc

SEQ ID NO: 16761 - RNA, 19 nt, synthetic construct
  misc_feature 1..19: note = Synthetic
  source 1..19: mol_type = other RNA
cgaggccgtcgcgggtggc

SEQ ID NO: 16762 - RNA, 21 nt, synthetic construct
  misc_feature 1..21: note = Synthetic
  source 1..21: mol_type = other RNA
cccgaggccgtcgcgggtggc

SEQ ID NO: 16763 - RNA, 22 nt, synthetic construct
  misc_feature 1..22: note = Synthetic
  source 1..22: mol_type = other RNA
gcccgaggccgtcgcgggtggc

SEQ ID NO: 16764 - RNA, 23 nt, synthetic construct
  misc_feature 1..23: note = Synthetic
  source 1..23: mol_type = other RNA
agcccgaggccgtcgcgggtggc

SEQ ID NO: 16765 - RNA, 24 nt, synthetic construct
  misc_feature 1..24: note = Synthetic
  source 1..24: mol_type = other RNA
gagcccgaggccgtcgcgggtggc

SEQ ID NO: 16766 - RNA, 18 nt, synthetic construct
  misc_feature 1..18: note = Synthetic
  source 1..18: mol_type = other RNA
gctaaagcccaagtcgtc

SEQ ID NO: 16767 - RNA, 19 nt, synthetic construct
  misc_feature 1..19: note = Synthetic
  source 1..19: mol_type = other RNA
cgctaaagcccaagtcgtc

SEQ ID NO: 16768 - RNA, 21 nt, synthetic construct
  misc_feature 1..21: note = Synthetic
  source 1..21: mol_type = other RNA
cgcgctaaagcccaagtcgtc

SEQ ID NO: 16769 - RNA, 22 nt, synthetic construct
  misc_feature 1..22: note = Synthetic
  source 1..22: mol_type = other RNA
ccgcgctaaagcccaagtcgtc

SEQ ID NO: 16770 - RNA, 23 nt, synthetic construct
  misc_feature 1..23: note = Synthetic
  source 1..23: mol_type = other RNA
cccgcgctaaagcccaagtcgtc

SEQ ID NO: 16771 - RNA, 24 nt, synthetic construct
  misc_feature 1..24: note = Synthetic
  source 1..24: mol_type = other RNA
gcccgcgctaaagcccaagtcgtc

SEQ ID NO: 16772 - RNA, 18 nt, synthetic construct
  misc_feature 1..18: note = Synthetic
  source 1..18: mol_type = other RNA
gtcgatttgggtgcgttc

SEQ ID NO: 16773 - RNA, 19 nt, synthetic construct
  misc_feature 1..19: note = Synthetic
  source 1..19: mol_type = other RNA
tgtcgatttgggtgcgttc

SEQ ID NO: 16774 - RNA, 21 nt, synthetic construct
  misc_feature 1..21: note = Synthetic
  source 1..21: mol_type = other RNA
aatgtcgatttgggtgcgttc

SEQ ID NO: 16775 - RNA, 22 nt, synthetic construct
  misc_feature 1..22: note = Synthetic
  source 1..22: mol_type = other RNA
gaatgtcgatttgggtgcgttc

SEQ ID NO: 16776 - RNA, 23 nt, synthetic construct
  misc_feature 1..23: note = Synthetic
  source 1..23: mol_type = other RNA
cgaatgtcgatttgggtgcgttc

SEQ ID NO: 16777 - RNA, 24 nt, synthetic construct
  misc_feature 1..24: note = Synthetic
  source 1..24: mol_type = other RNA
gcgaatgtcgatttgggtgcgttc

SEQ ID NO: 16778 - RNA, 18 nt, synthetic construct
  misc_feature 1..18: note = Synthetic
  source 1..18: mol_type = other RNA
gcgccccgttgcgtacag

SEQ ID NO: 16779 - RNA, 19 nt, synthetic construct
  misc_feature 1..19: note = Synthetic
  source 1..19: mol_type = other RNA
ggcgccccgttgcgtacag

SEQ ID NO: 16780 - RNA, 21 nt, synthetic construct
  misc_feature 1..21: note = Synthetic
  source 1..21: mol_type = other RNA
caggcgccccgttgcgtacag

SEQ ID NO: 16781 - RNA, 22 nt, synthetic construct
  misc_feature 1..22: note = Synthetic
  source 1..22: mol_type = other RNA
tcaggcgccccgttgcgtacag

SEQ ID NO: 16782 - RNA, 23 nt, synthetic construct
  misc_feature 1..23: note = Synthetic
  source 1..23: mol_type = other RNA
ctcaggcgccccgttgcgtacag

SEQ ID NO: 16783 - RNA, 24 nt, synthetic construct
  misc_feature 1..24: note = Synthetic
  source 1..24: mol_type = other RNA
gctcaggcgccccgttgcgtacag

SEQ ID NO: 16784 - RNA, 18 nt, synthetic construct
  misc_feature 1..18: note = Synthetic
  source 1..18: mol_type = other RNA
gggtggggagggcatgag

SEQ ID NO: 16785 - RNA, 19 nt, synthetic construct
  misc_feature 1..19: note = Synthetic
  source 1..19: mol_type = other RNA
tgggtggggagggcatgag

SEQ ID NO: 16786 - RNA, 21 nt, synthetic construct
  misc_feature 1..21: note = Synthetic
  source 1..21: mol_type = other RNA
catgggtggggagggcatgag

SEQ ID NO: 16787 - RNA, 22 nt, synthetic construct
  misc_feature 1..22: note = Synthetic
  source 1..22: mol_type = other RNA
gcatgggtggggagggcatgag

SEQ ID NO: 16788 - RNA, 23 nt, synthetic construct
  misc_feature 1..23: note = Synthetic
  source 1..23: mol_type = other RNA
ggcatgggtggggagggcatgag

SEQ ID NO: 16789 - RNA, 24 nt, synthetic construct
  misc_feature 1..24: note = Synthetic
  source 1..24: mol_type = other RNA
gggcatgggtggggagggcatgag

SEQ ID NO: 16790 - RNA, 18 nt, synthetic construct
  misc_feature 1..18: note = Synthetic
  source 1..18: mol_type = other RNA
cgagagagcgcttcgtag

SEQ ID NO: 16791 - RNA, 19 nt, synthetic construct
  misc_feature 1..19: note = Synthetic
  source 1..19: mol_type = other RNA
acgagagagcgcttcgtag

SEQ ID NO: 16792 - RNA, 21 nt, synthetic construct
  misc_feature 1..21: note = Synthetic
  source 1..21: mol_type = other RNA
aaacgagagagcgcttcgtag

SEQ ID NO: 16793 - RNA, 22 nt, synthetic construct
  misc_feature 1..22: note = Synthetic
  source 1..22: mol_type = other RNA
gaaacgagagagcgcttcgtag

SEQ ID NO: 16794 - RNA, 23 nt, synthetic construct
  misc_feature 1..23: note = Synthetic
  source 1..23: mol_type = other RNA
agaaacgagagagcgcttcgtag

SEQ ID NO: 16795 - RNA, 24 nt, synthetic construct
  misc_feature 1..24: note = Synthetic
  source 1..24: mol_type = other RNA
aagaaacgagagagcgcttcgtag

SEQ ID NO: 16796 - RNA, 18 nt, synthetic construct
  misc_feature 1..18: note = Synthetic
  source 1..18: mol_type = other RNA
cgtacagcgggggggccg

SEQ ID NO: 16797 - RNA, 19 nt, synthetic construct
  misc_feature 1..19: note = Synthetic
  source 1..19: mol_type = other RNA
gcgtacagcgggggggccg

SEQ ID NO: 16798 - RNA, 21 nt, synthetic construct
  misc_feature 1..21: note = Synthetic
  source 1..21: mol_type = other RNA
ttgcgtacagcgggggggccg

SEQ ID NO: 16799 - RNA, 22 nt, synthetic construct
  misc_feature 1..22: note = Synthetic
  source 1..22: mol_type = other RNA
gttgcgtacagcgggggggccg

SEQ ID NO: 16800 - RNA, 23 nt, synthetic construct
  misc_feature 1..23: note = Synthetic
  source 1..23: mol_type = other RNA
cgttgcgtacagcgggggggccg

SEQ ID NO: 16801 - RNA, 24 nt, synthetic construct
  misc_feature 1..24: note = Synthetic
  source 1..24: mol_type = other RNA
ccgttgcgtacagcgggggggccg

SEQ ID NO: 16802 - RNA, 18 nt, synthetic construct
  misc_feature 1..18: note = Synthetic
  source 1..18: mol_type = other RNA
cgcgggtggccggaagcg

SEQ ID NO: 16803 - RNA, 19 nt, synthetic construct
  misc_feature 1..19: note = Synthetic
  source 1..19: mol_type = other RNA
tcgcgggtggccggaagcg

SEQ ID NO: 16804 - RNA, 21 nt, synthetic construct
  misc_feature 1..21: note = Synthetic
  source 1..21: mol_type = other RNA
cgtcgcgggtggccggaagcg

SEQ ID NO: 16805 - RNA, 22 nt, synthetic construct
  misc_feature 1..22: note = Synthetic
  source 1..22: mol_type = other RNA
ccgtcgcgggtggccggaagcg

SEQ ID NO: 16806 - RNA, 23 nt, synthetic construct
  misc_feature 1..23: note = Synthetic
  source 1..23: mol_type = other RNA
gccgtcgcgggtggccggaagcg

SEQ ID NO: 16807 - RNA, 24 nt, synthetic construct
  misc_feature 1..24: note = Synthetic
  source 1..24: mol_type = other RNA
ggccgtcgcgggtggccggaagcg

SEQ ID NO: 16808 - RNA, 18 nt, synthetic construct
  misc_feature 1..18: note = Synthetic
  source 1..18: mol_type = other RNA
gccccgttgcgtacagcg

SEQ ID NO: 16809 - RNA, 19 nt, synthetic construct
  misc_feature 1..19: note = Synthetic
  source 1..19: mol_type = other RNA
cgccccgttgcgtacagcg

SEQ ID NO: 16810 - RNA, 21 nt, synthetic construct
  misc_feature 1..21: note = Synthetic
  source 1..21: mol_type = other RNA
ggcgccccgttgcgtacagcg

SEQ ID NO: 16811 - RNA, 22 nt, synthetic construct
  misc_feature 1..22: note = Synthetic
  source 1..22: mol_type = other RNA
aggcgccccgttgcgtacagcg

SEQ ID NO: 16812 - RNA, 23 nt, synthetic construct
  misc_feature 1..23: note = Synthetic
  source 1..23: mol_type = other RNA
caggcgccccgttgcgtacagcg

SEQ ID NO: 16813 - RNA, 24 nt, synthetic construct
  misc_feature 1..24: note = Synthetic
  source 1..24: mol_type = other RNA
tcaggcgccccgttgcgtacagcg

SEQ ID NO: 16814 - RNA, 18 nt, synthetic construct
  misc_feature 1..18: note = Synthetic
  source 1..18: mol_type = other RNA
cgagcatggtacatagcg

SEQ ID NO: 16815 - RNA, 19 nt, synthetic construct
  misc_feature 1..19: note = Synthetic
  source 1..19: mol_type = other RNA
tcgagcatggtacatagcg

SEQ ID NO: 16816 - RNA, 21 nt, synthetic construct
  misc_feature 1..21: note = Synthetic
  source 1..21: mol_type = other RNA
tatcgagcatggtacatagcg

SEQ ID NO: 16817 - RNA, 22 nt, synthetic construct
  misc_feature 1..22: note = Synthetic
  source 1..22: mol_type = other RNA
gtatcgagcatggtacatagcg

SEQ ID NO: 16818 - RNA, 23 nt, synthetic construct
  misc_feature 1..23: note = Synthetic
  source 1..23: mol_type = other RNA
ggtatcgagcatggtacatagcg

SEQ ID NO: 16819 - RNA, 24 nt, synthetic construct
  misc_feature 1..24: note = Synthetic
  source 1..24: mol_type = other RNA
aggtatcgagcatggtacatagcg

SEQ ID NO: 16820 - RNA, 18 nt, synthetic construct
  misc_feature 1..18: note = Synthetic
  source 1..18: mol_type = other RNA
cggcgttggtcggtagcg

SEQ ID NO: 16821 - RNA, 19 nt, synthetic construct
  misc_feature 1..19: note = Synthetic
  source 1..19: mol_type = other RNA
tcggcgttggtcggtagcg

SEQ ID NO: 16822 - RNA, 21 nt, synthetic construct
  misc_feature 1..21: note = Synthetic
  source 1..21: mol_type = other RNA
ggtcggcgttggtcggtagcg

SEQ ID NO: 16823 - RNA, 22 nt, synthetic construct
  misc_feature 1..22: note = Synthetic
  source 1..22: mol_type = other RNA
aggtcggcgttggtcggtagcg

SEQ ID NO: 16824 - RNA, 23 nt, synthetic construct
  misc_feature 1..23: note = Synthetic
  source 1..23: mol_type = other RNA
caggtcggcgttggtcggtagcg

SEQ ID NO: 16825 - RNA, 24 nt, synthetic construct
  misc_feature 1..24: note = Synthetic
  source 1..24: mol_type = other RNA
acaggtcggcgttggtcggtagcg

SEQ ID NO: 16826 - RNA, 18 nt, synthetic construct
  misc_feature 1..18: note = Synthetic
  source 1..18: mol_type = other RNA
cggttaaagagggcggcg

SEQ ID NO: 16827 - RNA, 19 nt, synthetic construct
  misc_feature 1..19: note = Synthetic
  source 1..19: mol_type = other RNA
acggttaaagagggcggcg

SEQ ID NO: 16828 - RNA, 21 nt, synthetic construct
  misc_feature 1..21: note = Synthetic
  source 1..21: mol_type = other RNA
agacggttaaagagggcggcg

SEQ ID NO: 16829 - RNA, 22 nt, synthetic construct
  misc_feature 1..22: note = Synthetic
  source 1..22: mol_type = other RNA
gagacggttaaagagggcggcg

SEQ ID NO: 16830 - RNA, 23 nt, synthetic construct
  misc_feature 1..23: note = Synthetic
  source 1..23: mol_type = other RNA
ggagacggttaaagagggcggcg

SEQ ID NO: 16831 - RNA, 24 nt, synthetic construct
  misc_feature 1..24: note = Synthetic
  source 1..24: mol_type = other RNA
aggagacggttaaagagggcggcg

SEQ ID NO: 16832 - RNA, 18 nt, synthetic construct
  misc_feature 1..18: note = Synthetic
  source 1..18: mol_type = other RNA
cgcgcccgtagctcggcg

SEQ ID NO: 16833 - RNA, 19 nt, synthetic construct
  misc_feature 1..19: note = Synthetic
  source 1..19: mol_type = other RNA
ccgcgcccgtagctcggcg

SEQ ID NO: 16834 - RNA, 21 nt, synthetic construct
  misc_feature 1..21: note = Synthetic
  source 1..21: mol_type = other RNA
tcccgcgcccgtagctcggcg

SEQ ID NO: 16835 - RNA, 22 nt, synthetic construct
  misc_feature 1..22: note = Synthetic
  source 1..22: mol_type = other RNA
ctcccgcgcccgtagctcggcg

SEQ ID NO: 16836 - RNA, 23 nt, synthetic construct
  misc_feature 1..23: note = Synthetic
  source 1..23: mol_type = other RNA
cctcccgcgcccgtagctcggcg

SEQ ID NO: 16837 - RNA, 24 nt, synthetic construct
  misc_feature 1..24: note = Synthetic
  source 1..24: mol_type = other RNA
tcctcccgcgcccgtagctcggcg

SEQ ID NO: 16838 - RNA, 18 nt, synthetic construct
  misc_feature 1..18: note = Synthetic
  source 1..18: mol_type = other RNA
agacggttaaagagggcg

SEQ ID NO: 16839 - RNA, 19 nt, synthetic construct
  misc_feature 1..19: note = Synthetic
  source 1..19: mol_type = other RNA
gagacggttaaagagggcg

SEQ ID NO: 16840 - RNA, 21 nt, synthetic construct
  misc_feature 1..21: note = Synthetic
  source 1..21: mol_type = other RNA
aggagacggttaaagagggcg

SEQ ID NO: 16841 - RNA, 22 nt, synthetic construct
  misc_feature 1..22: note = Synthetic
  source 1..22: mol_type = other RNA
gaggagacggttaaagagggcg

SEQ ID NO: 16842 - RNA, 23 nt, synthetic construct
  misc_feature 1..23: note = Synthetic
  source 1..23: mol_type = other RNA
cgaggagacggttaaagagggcg

SEQ ID NO: 16843 - RNA, 24 nt, synthetic construct
  misc_feature 1..24: note = Synthetic
  source 1..24: mol_type = other RNA
tcgaggagacggttaaagagggcg

SEQ ID NO: 16844 - RNA, 18 nt, synthetic construct
  misc_feature 1..18: note = Synthetic
  source 1..18: mol_type = other RNA
gggacccccggccgggcg

SEQ ID NO: 16845 - RNA, 19 nt, synthetic construct
  misc_feature 1..19: note = Synthetic
  source 1..19: mol_type = other RNA
tgggacccccggccgggcg

SEQ ID NO: 16846 - RNA, 21 nt, synthetic construct
  misc_feature 1..21: note = Synthetic
  source 1..21: mol_type = other RNA
tttgggacccccggccgggcg

SEQ ID NO: 16847 - RNA, 22 nt, synthetic construct
  misc_feature 1..22: note = Synthetic
  source 1..22: mol_type = other RNA
ttttgggacccccggccgggcg

SEQ ID NO: 16848 - RNA, 23 nt, synthetic construct
  misc_feature 1..23: note = Synthetic
  source 1..23: mol_type = other RNA
tttttgggacccccggccgggcg

SEQ ID NO: 16849 - RNA, 24 nt, synthetic construct
  misc_feature 1..24: note = Synthetic
  source 1..24: mol_type = other RNA
gtttttgggacccccggccgggcg

SEQ ID NO: 16850 - RNA, 18 nt, synthetic construct
  misc_feature 1..18: note = Synthetic
  source 1..18: mol_type = other RNA
ccccattccaccacatcg

SEQ ID NO: 16851 - RNA, 19 nt, synthetic construct
  misc_feature 1..19: note = Synthetic
  source 1..19: mol_type = other RNA
cccccattccaccacatcg

SEQ ID NO: 16852 - RNA, 21 nt, synthetic construct
  misc_feature 1..21: note = Synthetic
  source 1..21: mol_type = other RNA
tccccccattccaccacatcg

SEQ ID NO: 16853 - RNA, 22 nt, synthetic construct
  misc_feature 1..22: note = Synthetic
  source 1..22: mol_type = other RNA
gtccccccattccaccacatcg

SEQ ID NO: 16854 - RNA, 23 nt, synthetic construct
  misc_feature 1..23: note = Synthetic
  source 1..23: mol_type = other RNA
cgtccccccattccaccacatcg

SEQ ID NO: 16855 - RNA, 24 nt, synthetic construct
  misc_feature 1..24: note = Synthetic
  source 1..24: mol_type = other RNA
gcgtccccccattccaccacatcg

SEQ ID NO: 16856 - RNA, 18 nt, synthetic construct
  misc_feature 1..18: note = Synthetic
  source 1..18: mol_type = other RNA
gcgctaaagcccaagtcg

SEQ ID NO: 16857 - RNA, 19 nt, synthetic construct
  misc_feature 1..19: note = Synthetic
  source 1..19: mol_type = other RNA
cgcgctaaagcccaagtcg

SEQ ID NO: 16858 - RNA, 21 nt, synthetic construct
  misc_feature 1..21: note = Synthetic
  source 1..21: mol_type = other RNA
cccgcgctaaagcccaagtcg

SEQ ID NO: 16859 - RNA, 22 nt, synthetic construct
  misc_feature 1..22: note = Synthetic
  source 1..22: mol_type = other RNA
gcccgcgctaaagcccaagtcg

SEQ ID NO: 16860 - RNA, 23 nt, synthetic construct
  misc_feature 1..23: note = Synthetic
  source 1..23: mol_type = other RNA
ggcccgcgctaaagcccaagtcg

SEQ ID NO: 16861 - RNA, 24 nt, synthetic construct
  misc_feature 1..24: note = Synthetic
  source 1..24: mol_type = other RNA
gggcccgcgctaaagcccaagtcg

SEQ ID NO: 16862 - RNA, 18 nt, synthetic construct
  misc_feature 1..18: note = Synthetic
  source 1..18: mol_type = other RNA
ctaaagcccaagtcgtcg

SEQ ID NO: 16863 - RNA, 19 nt, synthetic construct
  misc_feature 1..19: note = Synthetic
  source 1..19: mol_type = other RNA
gctaaagcccaagtcgtcg

SEQ ID NO: 16864 - RNA, 21 nt, synthetic construct
  misc_feature 1..21: note = Synthetic
  source 1..21: mol_type = other RNA
gcgctaaagcccaagtcgtcg

SEQ ID NO: 16865 - RNA, 22 nt, synthetic construct
  misc_feature 1..22: note = Synthetic
  source 1..22: mol_type = other RNA
cgcgctaaagcccaagtcgtcg

SEQ ID NO: 16866 - RNA, 23 nt, synthetic construct
  misc_feature 1..23: note = Synthetic
  source 1..23: mol_type = other RNA
ccgcgctaaagcccaagtcgtcg

SEQ ID NO: 16867 - RNA, 24 nt, synthetic construct
  misc_feature 1..24: note = Synthetic
  source 1..24: mol_type = other RNA
cccgcgctaaagcccaagtcgtcg

SEQ ID NO: 16868 - RNA, 18 nt, synthetic construct
  misc_feature 1..18: note = Synthetic
  source 1..18: mol_type = other RNA
tgtttttgggacccccgg

SEQ ID NO: 16869 - RNA, 19 nt, synthetic construct
  misc_feature 1..19: note = Synthetic
  source 1..19: mol_type = other RNA
gtgtttttgggacccccgg

SEQ ID NO: 16870 - RNA, 21 nt, synthetic construct
  misc_feature 1..21: note = Synthetic
  source 1..21: mol_type = other RNA
gggtgtttttgggacccccgg

SEQ ID NO: 16871 - RNA, 22 nt, synthetic construct
  misc_feature 1..22: note = Synthetic
  source 1..22: mol_type = other RNA
ggggtgtttttgggacccccgg

SEQ ID NO: 16872 - RNA, 23 nt, synthetic construct
  misc_feature 1..23: note = Synthetic
  source 1..23: mol_type = other RNA
cggggtgtttttgggacccccgg

SEQ ID NO: 16873 - RNA, 24 nt, synthetic construct
  misc_feature 1..24: note = Synthetic
  source 1..24: mol_type = other RNA
ccggggtgtttttgggacccccgg

SEQ ID NO: 16874 - RNA, 18 nt, synthetic construct
  misc_feature 1..18: note = Synthetic
  source 1..18: mol_type = other RNA
tttgggacccccggccgg

SEQ ID NO: 16875 - RNA, 19 nt, synthetic construct
  misc_feature 1..19: note = Synthetic
  source 1..19: mol_type = other RNA
ttttgggacccccggccgg

SEQ ID NO: 16876 - RNA, 21 nt, synthetic construct
  misc_feature 1..21: note = Synthetic
  source 1..21: mol_type = other RNA
gtttttgggacccccggccgg

SEQ ID NO: 16877 - RNA, 22 nt, synthetic construct
  misc_feature 1..22: note = Synthetic
  source 1..22: mol_type = other RNA
tgtttttgggacccccggccgg

SEQ ID NO: 16878 - RNA, 23 nt, synthetic construct
  misc_feature 1..23: note = Synthetic
  source 1..23: mol_type = other RNA
gtgtttttgggacccccggccgg

SEQ ID NO: 16879 - RNA, 24 nt, synthetic construct
  misc_feature 1..24: note = Synthetic
  source 1..24: mol_type = other RNA
ggtgtttttgggacccccggccgg

SEQ ID NO: 16880 - RNA, 18 nt, synthetic construct
  misc_feature 1..18: note = Synthetic
  source 1..18: mol_type = other RNA
ccccgttgcgtacagcgg

SEQ ID NO: 16881 - RNA, 19 nt, synthetic construct
  misc_feature 1..19: note = Synthetic
  source 1..19: mol_type = other RNA
gccccgttgcgtacagcgg

SEQ ID NO: 16882 - RNA, 21 nt, synthetic construct
  misc_feature 1..21: note = Synthetic
  source 1..21: mol_type = other RNA
gcgccccgttgcgtacagcgg

SEQ ID NO: 16883 - RNA, 22 nt, synthetic construct
  misc_feature 1..22: note = Synthetic
  source 1..22: mol_type = other RNA
ggcgccccgttgcgtacagcgg

SEQ ID NO: 16884 - RNA, 23 nt, synthetic construct
  misc_feature 1..23: note = Synthetic
  source 1..23: mol_type = other RNA
aggcgccccgttgcgtacagcgg

SEQ ID NO: 16885 - RNA, 24 nt, synthetic construct
  misc_feature 1..24: note = Synthetic
  source 1..24: mol_type = other RNA
caggcgccccgttgcgtacagcgg

SEQ ID NO: 16886 - RNA, 18 nt, synthetic construct
  misc_feature 1..18: note = Synthetic
  source 1..18: mol_type = other RNA
ggttaaagagggcggcgg

SEQ ID NO: 16887 - RNA, 19 nt, synthetic construct
  misc_feature 1..19: note = Synthetic
  source 1..19: mol_type = other RNA
cggttaaagagggcggcgg

SEQ ID NO: 16888 - RNA, 21 nt, synthetic construct
  misc_feature 1..21: note = Synthetic
  source 1..21: mol_type = other RNA
gacggttaaagagggcggcgg

SEQ ID NO: 16889 - RNA, 22 nt, synthetic construct
  misc_feature 1..22: note = Synthetic
  source 1..22: mol_type = other RNA
agacggttaaagagggcggcgg

SEQ ID NO: 16890 - RNA, 23 nt, synthetic construct
  misc_feature 1..23: note = Synthetic
  source 1..23: mol_type = other RNA
gagacggttaaagagggcggcgg

SEQ ID NO: 16891 - RNA, 24 nt, synthetic construct
  misc_feature 1..24: note = Synthetic
  source 1..24: mol_type = other RNA
ggagacggttaaagagggcggcgg

SEQ ID NO: 16892 - RNA, 18 nt, synthetic construct
  misc_feature 1..18: note = Synthetic
  source 1..18: mol_type = other RNA
gacggttaaagagggcgg

SEQ ID NO: 16893 - RNA, 19 nt, synthetic construct
  misc_feature 1..19: note = Synthetic
  source 1..19: mol_type = other RNA
agacggttaaagagggcgg

SEQ ID NO: 16894 - RNA, 21 nt, synthetic construct
  misc_feature 1..21: note = Synthetic
  source 1..21: mol_type = other RNA
ggagacggttaaagagggcgg

SEQ ID NO: 16895 - RNA, 22 nt, synthetic construct
  misc_feature 1..22: note = Synthetic
  source 1..22: mol_type = other RNA
aggagacggttaaagagggcgg

SEQ ID NO: 16896 - RNA, 23 nt, synthetic construct
  misc_feature 1..23: note = Synthetic
  source 1..23: mol_type = other RNA
gaggagacggttaaagagggcgg

SEQ ID NO: 16897 - RNA, 24 nt, synthetic construct
  misc_feature 1..24: note = Synthetic
  source 1..24: mol_type = other RNA
cgaggagacggttaaagagggcgg

SEQ ID NO: 16898 - RNA, 18 nt, synthetic construct
  misc_feature 1..18: note = Synthetic
  source 1..18: mol_type = other RNA
ggacccccggccgggcgg

SEQ ID NO: 16899 - RNA, 19 nt, synthetic construct
  misc_feature 1..19: note = Synthetic
  source 1..19: mol_type = other RNA
gggacccccggccgggcgg

SEQ ID NO: 16900 - RNA, 21 nt, synthetic construct
  misc_feature 1..21: note = Synthetic
  source 1..21: mol_type = other RNA
ttgggacccccggccgggcgg

SEQ ID NO: 16901 - RNA, 22 nt, synthetic construct
  misc_feature 1..22: note = Synthetic
  source 1..22: mol_type = other RNA
tttgggacccccggccgggcgg

SEQ ID NO: 16902 - RNA, 23 nt, synthetic construct
  misc_feature 1..23: note = Synthetic
  source 1..23: mol_type = other RNA
ttttgggacccccggccgggcgg

SEQ ID NO: 16903 - RNA, 24 nt, synthetic construct
  misc_feature 1..24: note = Synthetic
  source 1..24: mol_type = other RNA
tttttgggacccccggccgggcgg

SEQ ID NO: 16904 - RNA, 18 nt, synthetic construct
  misc_feature 1..18: note = Synthetic
  source 1..18: mol_type = other RNA
ttgggacccccggccggg

SEQ ID NO: 16905 - RNA, 19 nt, synthetic construct
  misc_feature 1..19: note = Synthetic
  source 1..19: mol_type = other RNA
tttgggacccccggccggg

SEQ ID NO: 16906 - RNA, 21 nt, synthetic construct
  misc_feature 1..21: note = Synthetic
  source 1..21: mol_type = other RNA
tttttgggacccccggccggg

SEQ ID NO: 16907 - RNA, 22 nt, synthetic construct
  misc_feature 1..22: note = Synthetic
  source 1..22: mol_type = other RNA
gtttttgggacccccggccggg

SEQ ID NO: 16908 - RNA, 23 nt, synthetic construct
  misc_feature 1..23: note = Synthetic
  source 1..23: mol_type = other RNA
tgtttttgggacccccggccggg

SEQ ID NO: 16909 - RNA, 24 nt, synthetic construct
  misc_feature 1..24: note = Synthetic
  source 1..24: mol_type = other RNA
gtgtttttgggacccccggccggg

SEQ ID NO: 16910 - RNA, 18 nt, synthetic construct
  misc_feature 1..18: note = Synthetic
  source 1..18: mol_type = other RNA
gttaaagagggcggcggg

SEQ ID NO: 16911 - RNA, 19 nt, synthetic construct
  misc_feature 1..19: note = Synthetic
  source 1..19: mol_type = other RNA
ggttaaagagggcggcggg

SEQ ID NO: 16912 - RNA, 21 nt, synthetic construct
  misc_feature 1..21: note = Synthetic
  source 1..21: mol_type = other RNA
acggttaaagagggcggcggg

SEQ ID NO: 16913 - RNA, 22 nt, synthetic construct
  misc_feature 1..22: note = Synthetic
  source 1..22: mol_type = other RNA
gacggttaaagagggcggcggg

SEQ ID NO: 16914 - RNA, 23 nt, synthetic construct
  misc_feature 1..23: note = Synthetic
  source 1..23: mol_type = other RNA
agacggttaaagagggcggcggg

SEQ ID NO: 16915 - RNA, 24 nt, synthetic construct
  misc_feature 1..24: note = Synthetic
  source 1..24: mol_type = other RNA
gagacggttaaagagggcggcggg

SEQ ID NO: 16916 - RNA, 18 nt, synthetic construct
  misc_feature 1..18: note = Synthetic
  source 1..18: mol_type = other RNA
aagagggcggcggggggg

SEQ ID NO: 16917 - RNA, 19 nt, synthetic construct
  misc_feature 1..19: note = Synthetic
  source 1..19: mol_type = other RNA
aaagagggcggcggggggg

SEQ ID NO: 16918 - RNA, 21 nt, synthetic construct
  misc_feature 1..21: note = Synthetic
  source 1..21: mol_type = other RNA
ttaaagagggcggcggggggg

SEQ ID NO: 16919 - RNA, 22 nt, synthetic construct
  misc_feature 1..22: note = Synthetic
  source 1..22: mol_type = other RNA
gttaaagagggcggcggggggg

SEQ ID NO: 16920 - RNA, 23 nt, synthetic construct
  misc_feature 1..23: note = Synthetic
  source 1..23: mol_type = other RNA
ggttaaagagggcggcggggggg

SEQ ID NO: 16921 - RNA, 24 nt, synthetic construct
  misc_feature 1..24: note = Synthetic
  source 1..24: mol_type = other RNA
cggttaaagagggcggcggggggg

SEQ ID NO: 16922 - RNA, 18 nt, synthetic construct
  misc_feature 1..18: note = Synthetic
  source 1..18: mol_type = other RNA
gggggggacgggcatggg

SEQ ID NO: 16923 - RNA, 19 nt, synthetic construct
  misc_feature 1..19: note = Synthetic
  source 1..19: mol_type = other RNA
cgggggggacgggcatggg

SEQ ID NO: 16924 - RNA, 21 nt, synthetic construct
  misc_feature 1..21: note = Synthetic
  source 1..21: mol_type = other RNA
ggcgggggggacgggcatggg

SEQ ID NO: 16925 - RNA, 22 nt, synthetic construct
  misc_feature 1..22: note = Synthetic
  source 1..22: mol_type = other RNA
cggcgggggggacgggcatggg

SEQ ID NO: 16926 - RNA, 23 nt, synthetic construct
  misc_feature 1..23: note = Synthetic
  source 1..23: mol_type = other RNA
gcggcgggggggacgggcatggg

SEQ ID NO: 16927 - RNA, 24 nt, synthetic construct
  misc_feature 1..24: note = Synthetic
  source 1..24: mol_type = other RNA
ggcggcgggggggacgggcatggg

SEQ ID NO: 16928 - RNA, 18 nt, synthetic construct
  misc_feature 1..18: note = Synthetic
  source 1..18: mol_type = other RNA
gggacgggcatgggtggg

SEQ ID NO: 16929 - RNA, 19 nt, synthetic construct
  misc_feature 1..19: note = Synthetic
  source 1..19: mol_type = other RNA
ggggacgggcatgggtggg

SEQ ID NO: 16930 - RNA, 21 nt, synthetic construct
  misc_feature 1..21: note = Synthetic
  source 1..21: mol_type = other RNA
ggggggacgggcatgggtggg

SEQ ID NO: 16931 - RNA, 22 nt, synthetic construct
  misc_feature 1..22: note = Synthetic
  source 1..22: mol_type = other RNA
gggggggacgggcatgggtggg

SEQ ID NO: 16932 - RNA, 23 nt, synthetic construct
  misc_feature 1..23: note = Synthetic
  source 1..23: mol_type = other RNA
cgggggggacgggcatgggtggg

SEQ ID NO: 16933 - RNA, 24 nt, synthetic construct
  misc_feature 1..24: note = Synthetic
  source 1..24: mol_type = other RNA
gcgggggggacgggcatgggtggg

SEQ ID NO: 16934 - RNA, 18 nt, synthetic construct
  misc_feature 1..18: note = Synthetic
  source 1..18: mol_type = other RNA
cgggggggacgggcatgg

SEQ ID NO: 16935 - RNA, 19 nt, synthetic construct
  misc_feature 1..19: note = Synthetic
  source 1..19: mol_type = other RNA
gcgggggggacgggcatgg

SEQ ID NO: 16936 - RNA, 21 nt, synthetic construct
  misc_feature 1..21: note = Synthetic
  source 1..21: mol_type = other RNA
cggcgggggggacgggcatgg

SEQ ID NO: 16937 - RNA, 22 nt, synthetic construct
  misc_feature 1..22: note = Synthetic
  source 1..22: mol_type = other RNA
gcggcgggggggacgggcatgg

SEQ ID NO: 16938 - RNA, 23 nt, synthetic construct
  misc_feature 1..23: note = Synthetic
  source 1..23: mol_type = other RNA
ggcggcgggggggacgggcatgg

SEQ ID NO: 16939 - RNA, 24 nt, synthetic construct
  misc_feature 1..24: note = Synthetic
  source 1..24: mol_type = other RNA
gggcggcgggggggacgggcatgg

SEQ ID NO: 16940 - RNA, 18 nt, synthetic construct
  misc_feature 1..18: note = Synthetic
  source 1..18: mol_type = other RNA
gcccgtagctcggcgtgg

SEQ ID NO: 16941 - RNA, 19 nt, synthetic construct
  misc_feature 1..19: note = Synthetic
  source 1..19: mol_type = other RNA
cgcccgtagctcggcgtgg

SEQ ID NO: 16942 - RNA, 21 nt, synthetic construct
  misc_feature 1..21: note = Synthetic
  source 1..21: mol_type = other RNA
cgcgcccgtagctcggcgtgg

SEQ ID NO: 16943 - RNA, 22 nt, synthetic construct
  misc_feature 1..22: note = Synthetic
  source 1..22: mol_type = other RNA
ccgcgcccgtagctcggcgtgg

SEQ ID NO: 16944 - RNA, 23 nt, synthetic construct
  misc_feature 1..23: note = Synthetic
  source 1..23: mol_type = other RNA
cccgcgcccgtagctcggcgtgg

SEQ ID NO: 16945 - RNA, 24 nt, synthetic construct
  misc_feature 1..24: note = Synthetic
  source 1..24: mol_type = other RNA
tcccgcgcccgtagctcggcgtgg

SEQ ID NO: 16946 - RNA, 18 nt, synthetic construct
  misc_feature 1..18: note = Synthetic
  source 1..18: mol_type = other RNA
cgaggccgtcgcgggtgg

SEQ ID NO: 16947 - RNA, 19 nt, synthetic construct
  misc_feature 1..19: note = Synthetic
  source 1..19: mol_type = other RNA
ccgaggccgtcgcgggtgg

SEQ ID NO: 16948 - RNA, 21 nt, synthetic construct
  misc_feature 1..21: note = Synthetic
  source 1..21: mol_type = other RNA
gcccgaggccgtcgcgggtgg

SEQ ID NO: 16949 - RNA, 22 nt, synthetic construct
  misc_feature 1..22: note = Synthetic
  source 1..22: mol_type = other RNA
agcccgaggccgtcgcgggtgg

SEQ ID NO: 16950 - RNA, 23 nt, synthetic construct
  misc_feature 1..23: note = Synthetic
  source 1..23: mol_type = other RNA
gagcccgaggccgtcgcgggtgg

SEQ ID NO: 16951 - RNA, 24 nt, synthetic construct
  misc_feature 1..24: note = Synthetic
  source 1..24: mol_type = other RNA
agagcccgaggccgtcgcgggtgg

SEQ ID NO: 16952 - RNA, 18 nt, synthetic construct
  misc_feature 1..18: note = Synthetic
  source 1..18: mol_type = other RNA
gaccaagaggtccattgg

SEQ ID NO: 16953 - RNA, 19 nt, synthetic construct
  misc_feature 1..19: note = Synthetic
  source 1..19: mol_type = other RNA
cgaccaagaggtccattgg

SEQ ID NO: 16954 - RNA, 20 nt, synthetic construct
  misc_feature 1..20: note = Synthetic
  source 1..20: mol_type = other RNA
tcgaccaagaggtccattgg

SEQ ID NO: 16955 - RNA, 21 nt, synthetic construct
  misc_feature 1..21: note = Synthetic
  source 1..21: mol_type = other RNA
gtcgaccaagaggtccattgg

SEQ ID NO: 16956 - RNA, 22 nt, synthetic construct
  misc_feature 1..22: note = Synthetic
  source 1..22: mol_type = other RNA
cgtcgaccaagaggtccattgg

SEQ ID NO: 16957 - RNA, 23 nt, synthetic construct
  misc_feature 1..23: note = Synthetic
  source 1..23: mol_type = other RNA
tcgtcgaccaagaggtccattgg

SEQ ID NO: 16958 - RNA, 24 nt, synthetic construct
  misc_feature 1..24: note = Synthetic
  source 1..24: mol_type = other RNA
ctcgtcgaccaagaggtccattgg

SEQ ID NO: 16959 - RNA, 18 nt, synthetic construct
  misc_feature 1..18: note = Synthetic
  source 1..18: mol_type = other RNA
ccgggcgggggggcggtg

SEQ ID NO: 16960 - RNA, 19 nt, synthetic construct
  misc_feature 1..19: note = Synthetic
  source 1..19: mol_type = other RNA
gccgggcgggggggcggtg

SEQ ID NO: 16961 - RNA, 21 nt, synthetic construct
  misc_feature 1..21: note = Synthetic
  source 1..21: mol_type = other RNA
cggccgggcgggggggcggtg

SEQ ID NO: 16962 - RNA, 22 nt, synthetic construct
  misc_feature 1..22: note = Synthetic
  source 1..22: mol_type = other RNA
ccggccgggcgggggggcggtg

SEQ ID NO: 16963 - RNA, 23 nt, synthetic construct
  misc_feature 1..23: note = Synthetic
  source 1..23: mol_type = other RNA
cccggccgggcgggggggcggtg

SEQ ID NO: 16964 - RNA, 24 nt, synthetic construct
  misc_feature 1..24: note = Synthetic
  source 1..24: mol_type = other RNA
ccccggccgggcgggggggcggtg

SEQ ID NO: 16965 - RNA, 18 nt, synthetic construct
  misc_feature 1..18: note = Synthetic
  source 1..18: mol_type = other RNA
gggggacgggcatgggtg

SEQ ID NO: 16966 - RNA, 19 nt, synthetic construct
  misc_feature 1..19: note = Synthetic
  source 1..19: mol_type = other RNA
ggggggacgggcatgggtg

SEQ ID NO: 16967 - RNA, 21 nt, synthetic construct
  misc_feature 1..21: note = Synthetic
  source 1..21: mol_type = other RNA
cgggggggacgggcatgggtg

SEQ ID NO: 16968 - RNA, 22 nt, synthetic construct
  misc_feature 1..22: note = Synthetic
  source 1..22: mol_type = other RNA
gcgggggggacgggcatgggtg

SEQ ID NO: 16969 - RNA, 23 nt, synthetic construct
  misc_feature 1..23: note = Synthetic
  source 1..23: mol_type = other RNA
ggcgggggggacgggcatgggtg

SEQ ID NO: 16970 - RNA, 24 nt, synthetic construct
  misc_feature 1..24: note = Synthetic
  source 1..24: mol_type = other RNA
cggcgggggggacgggcatgggtg

SEQ ID NO: 16971 - RNA, 18 nt, synthetic construct
  misc_feature 1..18: note = Synthetic
  source 1..18: mol_type = other RNA
ccattgggtggggttgat

SEQ ID NO: 16972 - RNA, 19 nt, synthetic construct
  misc_feature 1..19: note = Synthetic
  source 1..19: mol_type = other RNA
tccattgggtggggttgat

SEQ ID NO: 16973 - RNA, 20 nt, synthetic construct
  misc_feature 1..20: note = Synthetic
  source 1..20: mol_type = other RNA
gtccattgggtggggttgat

SEQ ID NO: 16974 - RNA, 21 nt, synthetic construct
  misc_feature 1..21: note = Synthetic
  source 1..21: mol_type = other RNA
ggtccattgggtggggttgat

SEQ ID NO: 16975 - RNA, 22 nt, synthetic construct
  misc_feature 1..22: note = Synthetic
  source 1..22: mol_type = other RNA
aggtccattgggtggggttgat

SEQ ID NO: 16976 - RNA, 23 nt, synthetic construct
  misc_feature 1..23: note = Synthetic
  source 1..23: mol_type = other RNA
gaggtccattgggtggggttgat

SEQ ID NO: 16977 - RNA, 24 nt, synthetic construct
  misc_feature 1..24: note = Synthetic
  source 1..24: mol_type = other RNA
agaggtccattgggtggggttgat

SEQ ID NO: 16978 - RNA, 18 nt, synthetic construct
  misc_feature 1..18: note = Synthetic
  source 1..18: mol_type = other RNA
gcgggtggccggaagcgt

SEQ ID NO: 16979 - RNA, 19 nt, synthetic construct
  misc_feature 1..19: note = Synthetic
  source 1..19: mol_type = other RNA
cgcgggtggccggaagcgt

SEQ ID NO: 16980 - RNA, 21 nt, synthetic construct
  misc_feature 1..21: note = Synthetic
  source 1..21: mol_type = other RNA
gtcgcgggtggccggaagcgt

SEQ ID NO: 16981 - RNA, 22 nt, synthetic construct
  misc_feature 1..22: note = Synthetic
  source 1..22: mol_type = other RNA
cgtcgcgggtggccggaagcgt

SEQ ID NO: 16982 - RNA, 23 nt, synthetic construct
  misc_feature 1..23: note = Synthetic
  source 1..23: mol_type = other RNA
ccgtcgcgggtggccggaagcgt

SEQ ID NO: 16983 - RNA, 24 nt, synthetic construct
  misc_feature 1..24: note = Synthetic
  source 1..24: mol_type = other RNA
gccgtcgcgggtggccggaagcgt

SEQ ID NO: 16984 - RNA, 18 nt, synthetic construct
  misc_feature 1..18: note = Synthetic
  source 1..18: mol_type = other RNA
atgtcgatttgggtgcgt

SEQ ID NO: 16985 - RNA, 19 nt, synthetic construct
  misc_feature 1..19: note = Synthetic
  source 1..19: mol_type = other RNA
aatgtcgatttgggtgcgt

SEQ ID NO: 16986 - RNA, 21 nt, synthetic construct
  misc_feature 1..21: note = Synthetic
  source 1..21: mol_type = other RNA
cgaatgtcgatttgggtgcgt

SEQ ID NO: 16987 - RNA, 22 nt, synthetic construct
  misc_feature 1..22: note = Synthetic
  source 1..22: mol_type = other RNA
gcgaatgtcgatttgggtgcgt

SEQ ID NO: 16988 - RNA, 23 nt, synthetic construct
  misc_feature 1..23: note = Synthetic
  source 1..23: mol_type = other RNA
cgcgaatgtcgatttgggtgcgt

SEQ ID NO: 16989 - RNA, 24 nt, synthetic construct
  misc_feature 1..24: note = Synthetic
  source 1..24: mol_type = other RNA
gcgcgaatgtcgatttgggtgcgt

SEQ ID NO: 16990 - RNA, 18 nt, synthetic construct
  misc_feature 1..18: note = Synthetic
  source 1..18: mol_type = other RNA
ggggggacgggcatgggt

SEQ ID NO: 16991 - RNA, 19 nt, synthetic construct
  misc_feature 1..19: note = Synthetic
  source 1..19: mol_type = other RNA
gggggggacgggcatgggt

SEQ ID NO: 16992 - RNA, 21 nt, synthetic construct
  misc_feature 1..21: note = Synthetic
  source 1..21: mol_type = other RNA
gcgggggggacgggcatgggt

SEQ ID NO: 16993 - RNA, 22 nt, synthetic construct
  misc_feature 1..22: note = Synthetic
  source 1..22: mol_type = other RNA
ggcgggggggacgggcatgggt

SEQ ID NO: 16994 - RNA, 23 nt, synthetic construct
  misc_feature 1..23: note = Synthetic
  source 1..23: mol_type = other RNA
cggcgggggggacgggcatgggt

SEQ ID NO: 16995 - RNA, 24 nt, synthetic construct
  misc_feature 1..24: note = Synthetic
  source 1..24: mol_type = other RNA
gcggcgggggggacgggcatgggt

SEQ ID NO: 16996 - RNA, 18 nt, synthetic construct
  misc_feature 1..18: note = Synthetic
  source 1..18: mol_type = other RNA
tgtcgatttgggtgcgtt

SEQ ID NO: 16997 - RNA, 19 nt, synthetic construct
  misc_feature 1..19: note = Synthetic
  source 1..19: mol_type = other RNA
atgtcgatttgggtgcgtt

SEQ ID NO: 16998 - RNA, 21 nt, synthetic construct
  misc_feature 1..21: note = Synthetic
  source 1..21: mol_type = other RNA
gaatgtcgatttgggtgcgtt

SEQ ID NO: 16999 - RNA, 22 nt, synthetic construct
  misc_feature 1..22: note = Synthetic
  source 1..22: mol_type = other RNA
cgaatgtcgatttgggtgcgtt

SEQ ID NO: 17000 - RNA, 23 nt, synthetic construct
  misc_feature 1..23: note = Synthetic
  source 1..23: mol_type = other RNA
gcgaatgtcgatttgggtgcgtt

SEQ ID NO: 17001 - RNA, 24 nt, synthetic construct
  misc_feature 1..24: note = Synthetic
  source 1..24: mol_type = other RNA
cgcgaatgtcgatttgggtgcgtt

SEQ ID NO: 17002 - RNA, 18 nt, synthetic construct
  misc_feature 1..18: note = Synthetic
  source 1..18: mol_type = other RNA
ggggccgccggggtgttt

SEQ ID NO: 17003 - RNA, 19 nt, synthetic construct
  misc_feature 1..19: note = Synthetic
  source 1..19: mol_type = other RNA
gggggccgccggggtgttt

SEQ ID NO: 17004 - RNA, 21 nt, synthetic construct
  misc_feature 1..21: note = Synthetic
  source 1..21: mol_type = other RNA
gggggggccgccggggtgttt

SEQ ID NO: 17005 - RNA, 22 nt, synthetic construct
  misc_feature 1..22: note = Synthetic
  source 1..22: mol_type = other RNA
cgggggggccgccggggtgttt

SEQ ID NO: 17006 - RNA, 23 nt, synthetic construct
  misc_feature 1..23: note = Synthetic
  source 1..23: mol_type = other RNA
gcgggggggccgccggggtgttt

SEQ ID NO: 17007 - RNA, 24 nt, synthetic construct
  misc_feature 1..24: note = Synthetic
  source 1..24: mol_type = other RNA
agcgggggggccgccggggtgttt

SEQ ID NO: 17008 - RNA, 18 nt, synthetic construct
  misc_feature 1..18: note = Synthetic
  source 1..18: mol_type = other RNA
gggccgccggggtgtttt

SEQ ID NO: 17009 - RNA, 19 nt, synthetic construct
  misc_feature 1..19: note = Synthetic
  source 1..19: mol_type = other RNA
ggggccgccggggtgtttt

SEQ ID NO: 17010 - RNA, 21 nt, synthetic construct
  misc_feature 1..21: note = Synthetic
  source 1..21: mol_type = other RNA
ggggggccgccggggtgtttt

SEQ ID NO: 17011 - RNA, 22 nt, synthetic construct
  misc_feature 1..22: note = Synthetic
  source 1..22: mol_type = other RNA
gggggggccgccggggtgtttt

SEQ ID NO: 17012 - RNA, 23 nt, synthetic construct
  misc_feature 1..23: note = Synthetic
  source 1..23: mol_type = other RNA
cgggggggccgccggggtgtttt

SEQ ID NO: 17013 - RNA, 24 nt, synthetic construct
  misc_feature 1..24: note = Synthetic
  source 1..24: mol_type = other RNA
gcgggggggccgccggggtgtttt

SEQ ID NO: 17014 - RNA, 18 nt, synthetic construct
  misc_feature 1..18: note = Synthetic
  source 1..18: mol_type = other RNA
cccccccgctgtacgcaa

SEQ ID NO: 17015 - RNA, 19 nt, synthetic construct
  misc_feature 1..19: note = Synthetic
  source 1..19: mol_type = other RNA
gcccccccgctgtacgcaa

SEQ ID NO: 17016 - RNA, 21 nt, synthetic construct
  misc_feature 1..21: note = Synthetic
  source 1..21: mol_type = other RNA
cggcccccccgctgtacgcaa

SEQ ID NO: 17017 - RNA, 22 nt, synthetic construct
  misc_feature 1..22: note = Synthetic
  source 1..22: mol_type = other RNA
gcggcccccccgctgtacgcaa

SEQ ID NO: 17018 - RNA, 23 nt, synthetic construct
  misc_feature 1..23: note = Synthetic
  source 1..23: mol_type = other RNA
ggcggcccccccgctgtacgcaa

SEQ ID NO: 17019 - RNA, 24 nt, synthetic construct
  misc_feature 1..24: note = Synthetic
  source 1..24: mol_type = other RNA
cggcggcccccccgctgtacgcaa

SEQ ID NO: 17020 - RNA, 18 nt, synthetic construct
  misc_feature 1..18: note = Synthetic
  source 1..18: mol_type = other RNA
cccagcgatgtggtggaa

SEQ ID NO: 17021 - RNA, 19 nt, synthetic construct
  misc_feature 1..19: note = Synthetic
  source 1..19: mol_type = other RNA
gcccagcgatgtggtggaa

SEQ ID NO: 17022 - RNA, 21 nt, synthetic construct
  misc_feature 1..21: note = Synthetic
  source 1..21: mol_type = other RNA
ctgcccagcgatgtggtggaa

SEQ ID NO: 17023 - RNA, 22 nt, synthetic construct
  misc_feature 1..22: note = Synthetic
  source 1..22: mol_type = other RNA
gctgcccagcgatgtggtggaa

SEQ ID NO: 17024 - RNA, 23 nt, synthetic construct
  misc_feature 1..23: note = Synthetic
  source 1..23: mol_type = other RNA
cgctgcccagcgatgtggtggaa

SEQ ID NO: 17025 - RNA, 24 nt, synthetic construct
  misc_feature 1..24: note = Synthetic
  source 1..24: mol_type = other RNA
acgctgcccagcgatgtggtggaa

SEQ ID NO: 17026 - RNA, 18 nt, synthetic construct
  misc_feature 1..18: note = Synthetic
  source 1..18: mol_type = other RNA
ccgtatcaaccccaccca

SEQ ID NO: 17027 - RNA, 19 nt, synthetic construct
  misc_feature 1..19: note = Synthetic
  source 1..19: mol_type = other RNA
cccgtatcaaccccaccca

SEQ ID NO: 17028 - RNA, 20 nt, synthetic construct
  misc_feature 1..20: note = Synthetic
  source 1..20: mol_type = other RNA
tcccgtatcaaccccaccca

SEQ ID NO: 17029 - RNA, 21 nt, synthetic construct
  misc_feature 1..21: note = Synthetic
  source 1..21: mol_type = other RNA
ttcccgtatcaaccccaccca

SEQ ID NO: 17030 - RNA, 22 nt, synthetic construct
  misc_feature 1..22: note = Synthetic
  source 1..22: mol_type = other RNA
tttcccgtatcaaccccaccca

SEQ ID NO: 17031 - RNA, 23 nt, synthetic construct
  misc_feature 1..23: note = Synthetic
  source 1..23: mol_type = other RNA
ctttcccgtatcaaccccaccca

SEQ ID NO: 17032 - RNA, 24 nt, synthetic construct
  misc_feature 1..24: note = Synthetic
  source 1..24: mol_type = other RNA
tctttcccgtatcaaccccaccca

SEQ ID NO: 17033 - RNA, 18 nt, synthetic construct
  misc_feature 1..18: note = Synthetic
  source 1..18: mol_type = other RNA
gcccccccgctgtacgca

SEQ ID NO: 17034 - RNA, 19 nt, synthetic construct
  misc_feature 1..19: note = Synthetic
  source 1..19: mol_type = other RNA
ggcccccccgctgtacgca

SEQ ID NO: 17035 - RNA, 21 nt, synthetic construct
  misc_feature 1..21: note = Synthetic
  source 1..21: mol_type = other RNA
gcggcccccccgctgtacgca

SEQ ID NO: 17036 - RNA, 22 nt, synthetic construct
  misc_feature 1..22: note = Synthetic
  source 1..22: mol_type = other RNA
ggcggcccccccgctgtacgca

SEQ ID NO: 17037 - RNA, 23 nt, synthetic construct
  misc_feature 1..23: note = Synthetic
  source 1..23: mol_type = other RNA
cggcggcccccccgctgtacgca

SEQ ID NO: 17038 - RNA, 24 nt, synthetic construct
  misc_feature 1..24: note = Synthetic
  source 1..24: mol_type = other RNA
ccggcggcccccccgctgtacgca

SEQ ID NO: 17039 - RNA, 18 nt, synthetic construct
  misc_feature 1..18: note = Synthetic
  source 1..18: mol_type = other RNA
ccatgctcgatacctgga

SEQ ID NO: 17040 - RNA, 19 nt, synthetic construct
  misc_feature 1..19: note = Synthetic
  source 1..19: mol_type = other RNA
accatgctcgatacctgga

SEQ ID NO: 17041 - RNA, 21 nt, synthetic construct
  misc_feature 1..21: note = Synthetic
  source 1..21: mol_type = other RNA
gtaccatgctcgatacctgga

SEQ ID NO: 17042 - RNA, 22 nt, synthetic construct
  misc_feature 1..22: note = Synthetic
  source 1..22: mol_type = other RNA
tgtaccatgctcgatacctgga

SEQ ID NO: 17043 - RNA, 23 nt, synthetic construct
  misc_feature 1..23: note = Synthetic
  source 1..23: mol_type = other RNA
atgtaccatgctcgatacctgga

SEQ ID NO: 17044 - RNA, 24 nt, synthetic construct
  misc_feature 1..24: note = Synthetic
  source 1..24: mol_type = other RNA
tatgtaccatgctcgatacctgga

SEQ ID NO: 17045 - RNA, 18 nt, synthetic construct
  misc_feature 1..18: note = Synthetic
  source 1..18: mol_type = other RNA
gcccagcgatgtggtgga

SEQ ID NO: 17046 - RNA, 19 nt, synthetic construct
  misc_feature 1..19: note = Synthetic
  source 1..19: mol_type = other RNA
tgcccagcgatgtggtgga

SEQ ID NO: 17047 - RNA, 21 nt, synthetic construct
  misc_feature 1..21: note = Synthetic
  source 1..21: mol_type = other RNA
gctgcccagcgatgtggtgga

SEQ ID NO: 17048 - RNA, 22 nt, synthetic construct
  misc_feature 1..22: note = Synthetic
  source 1..22: mol_type = other RNA
cgctgcccagcgatgtggtgga

SEQ ID NO: 17049 - RNA, 23 nt, synthetic construct
  misc_feature 1..23: note = Synthetic
  source 1..23: mol_type = other RNA
acgctgcccagcgatgtggtgga

SEQ ID NO: 17050 - RNA, 24 nt, synthetic construct
  misc_feature 1..24: note = Synthetic
  source 1..24: mol_type = other RNA
aacgctgcccagcgatgtggtgga

SEQ ID NO: 17051 - RNA, 18 nt, synthetic construct
  misc_feature 1..18: note = Synthetic
  source 1..18: mol_type = other RNA
ggcgcgggaggagagcta

SEQ ID NO: 17052 - RNA, 19 nt, synthetic construct
  misc_feature 1..19: note = Synthetic
  source 1..19: mol_type = other RNA
gggcgcgggaggagagcta

SEQ ID NO: 17053 - RNA, 20 nt, synthetic construct
  misc_feature 1..20: note = Synthetic
  source 1..20: mol_type = other RNA
cgggcgcgggaggagagcta

SEQ ID NO: 17054 - RNA, 21 nt, synthetic construct
  misc_feature 1..21: note = Synthetic
  source 1..21: mol_type = other RNA
acgggcgcgggaggagagcta

SEQ ID NO: 17055 - RNA, 22 nt, synthetic construct
  misc_feature 1..22: note = Synthetic
  source 1..22: mol_type = other RNA
tacgggcgcgggaggagagcta

SEQ ID NO: 17056 - RNA, 23 nt, synthetic construct
  misc_feature 1..23: note = Synthetic
  source 1..23: mol_type = other RNA
ctacgggcgcgggaggagagcta

SEQ ID NO: 17057 - RNA, 24 nt, synthetic construct
  misc_feature 1..24: note = Synthetic
  source 1..24: mol_type = other RNA
gctacgggcgcgggaggagagcta

SEQ ID NO: 17058 - RNA, 18 nt, synthetic construct
  misc_feature 1..18: note = Synthetic
  source 1..18: mol_type = other RNA
gaccaacgccgacctgta

SEQ ID NO: 17059 - RNA, 19 nt, synthetic construct
  misc_feature 1..19: note = Synthetic
  source 1..19: mol_type = other RNA
cgaccaacgccgacctgta

SEQ ID NO: 17060 - RNA, 21 nt, synthetic construct
  misc_feature 1..21: note = Synthetic
  source 1..21: mol_type = other RNA
accgaccaacgccgacctgta

SEQ ID NO: 17061 - RNA, 22 nt, synthetic construct
  misc_feature 1..22: note = Synthetic
  source 1..22: mol_type = other RNA
taccgaccaacgccgacctgta

SEQ ID NO: 17062 - RNA, 23 nt, synthetic construct
  misc_feature 1..23: note = Synthetic
  source 1..23: mol_type = other RNA
ctaccgaccaacgccgacctgta

SEQ ID NO: 17063 - RNA, 24 nt, synthetic construct
  misc_feature 1..24: note = Synthetic
  source 1..24: mol_type = other RNA
gctaccgaccaacgccgacctgta

SEQ ID NO: 17064 - RNA, 18 nt, synthetic construct
  misc_feature 1..18: note = Synthetic
  source 1..18: mol_type = other RNA
ctgtttgccgacatgaac

SEQ ID NO: 17065 - RNA, 19 nt, synthetic construct
  misc_feature 1..19: note = Synthetic
  source 1..19: mol_type = other RNA
gctgtttgccgacatgaac

SEQ ID NO: 17066 - RNA, 21 nt, synthetic construct
  misc_feature 1..21: note = Synthetic
  source 1..21: mol_type = other RNA
gagctgtttgccgacatgaac

SEQ ID NO: 17067 - RNA, 22 nt, synthetic construct
  misc_feature 1..22: note = Synthetic
  source 1..22: mol_type = other RNA
cgagctgtttgccgacatgaac

SEQ ID NO: 17068 - RNA, 23 nt, synthetic construct
  misc_feature 1..23: note = Synthetic
  source 1..23: mol_type = other RNA
acgagctgtttgccgacatgaac

SEQ ID NO: 17069 - RNA, 24 nt, synthetic construct
  misc_feature 1..24: note = Synthetic
  source 1..24: mol_type = other RNA
gacgagctgtttgccgacatgaac

SEQ ID NO: 17070 - RNA, 18 nt, synthetic construct
  misc_feature 1..18: note = Synthetic
  source 1..18: mol_type = other RNA
aaccgtctcctcgacgac

SEQ ID NO: 17071 - RNA, 19 nt, synthetic construct
  misc_feature 1..19: note = Synthetic
  source 1..19: mol_type = other RNA
taaccgtctcctcgacgac

SEQ ID NO: 17072 - RNA, 21 nt, synthetic construct
  misc_feature 1..21: note = Synthetic
  source 1..21: mol_type = other RNA
tttaaccgtctcctcgacgac

SEQ ID NO: 17073 - RNA, 22 nt, synthetic construct
  misc_feature 1..22: note = Synthetic
  source 1..22: mol_type = other RNA
ctttaaccgtctcctcgacgac

SEQ ID NO: 17074 - RNA, 23 nt, synthetic construct
  misc_feature 1..23: note = Synthetic
  source 1..23: mol_type = other RNA
tctttaaccgtctcctcgacgac

SEQ ID NO: 17075 - RNA, 24 nt, synthetic construct
  misc_feature 1..24: note = Synthetic
  source 1..24: mol_type = other RNA
ctctttaaccgtctcctcgacgac

SEQ ID NO: 17076 - RNA, 18 nt, synthetic construct
  misc_feature 1..18: note = Synthetic
  source 1..18: mol_type = other RNA
gacgagctgtttgccgac

SEQ ID NO: 17077 - RNA, 19 nt, synthetic construct
  misc_feature 1..19: note = Synthetic
  source 1..19: mol_type = other RNA
cgacgagctgtttgccgac

SEQ ID NO: 17078 - RNA, 21 nt, synthetic construct
  misc_feature 1..21: note = Synthetic
  source 1..21: mol_type = other RNA
gtcgacgagctgtttgccgac

SEQ ID NO: 17079 - RNA, 22 nt, synthetic construct
  misc_feature 1..22: note = Synthetic
  source 1..22: mol_type = other RNA
ggtcgacgagctgtttgccgac

SEQ ID NO: 17080 - RNA, 23 nt, synthetic construct
  misc_feature 1..23: note = Synthetic
  source 1..23: mol_type = other RNA
tggtcgacgagctgtttgccgac

SEQ ID NO: 17081 - RNA, 24 nt, synthetic construct
  misc_feature 1..24: note = Synthetic
  source 1..24: mol_type = other RNA
ttggtcgacgagctgtttgccgac

SEQ ID NO: 17082 - RNA, 18 nt, synthetic construct
  misc_feature 1..18: note = Synthetic
  source 1..18: mol_type = other RNA
atgtaccatgctcgatac

SEQ ID NO: 17083 - RNA, 19 nt, synthetic construct
  misc_feature 1..19: note = Synthetic
  source 1..19: mol_type = other RNA
tatgtaccatgctcgatac

SEQ ID NO: 17084 - RNA, 21 nt, synthetic construct
  misc_feature 1..21: note = Synthetic
  source 1..21: mol_type = other RNA
gctatgtaccatgctcgatac

SEQ ID NO: 17085 - RNA, 22 nt, synthetic construct
  misc_feature 1..22: note = Synthetic
  source 1..22: mol_type = other RNA
cgctatgtaccatgctcgatac

SEQ ID NO: 17086 - RNA, 23 nt, synthetic construct
  misc_feature 1..23: note = Synthetic
  source 1..23: mol_type = other RNA
gcgctatgtaccatgctcgatac

SEQ ID NO: 17087 - RNA, 24 nt, synthetic construct
  misc_feature 1..24: note = Synthetic
  source 1..24: mol_type = other RNA
cgcgctatgtaccatgctcgatac

SEQ ID NO: 17088 - RNA, 18 nt, synthetic construct
  misc_feature 1..18: note = Synthetic
  source 1..18: mol_type = other RNA
accaacgccgacctgtac

SEQ ID NO: 17089 - RNA, 19 nt, synthetic construct
  misc_feature 1..19: note = Synthetic
  source 1..19: mol_type = other RNA
gaccaacgccgacctgtac

SEQ ID NO: 17090 - RNA, 21 nt, synthetic construct
  misc_feature 1..21: note = Synthetic
  source 1..21: mol_type = other RNA
ccgaccaacgccgacctgtac

SEQ ID NO: 17091 - RNA, 22 nt, synthetic construct
  misc_feature 1..22: note = Synthetic
  source 1..22: mol_type = other RNA
accgaccaacgccgacctgtac

SEQ ID NO: 17092 - RNA, 23 nt, synthetic construct
  misc_feature 1..23: note = Synthetic
  source 1..23: mol_type = other RNA
taccgaccaacgccgacctgtac

SEQ ID NO: 17093 - RNA, 24 nt, synthetic construct
  misc_feature 1..24: note = Synthetic
  source 1..24: mol_type = other RNA
ctaccgaccaacgccgacctgtac

SEQ ID NO: 17094 - RNA, 18 nt, synthetic construct
  misc_feature 1..18: note = Synthetic
  source 1..18: mol_type = other RNA
tgtaccatgctcgatacc

SEQ ID NO: 17095 - RNA, 19 nt, synthetic construct
  misc_feature 1..19: note = Synthetic
  source 1..19: mol_type = other RNA
atgtaccatgctcgatacc

SEQ ID NO: 17096 - RNA, 21 nt, synthetic construct
  misc_feature 1..21: note = Synthetic
  source 1..21: mol_type = other RNA
ctatgtaccatgctcgatacc

SEQ ID NO: 17097 - RNA, 22 nt, synthetic construct
  misc_feature 1..22: note = Synthetic
  source 1..22: mol_type = other RNA
gctatgtaccatgctcgatacc

SEQ ID NO: 17098 - RNA, 23 nt, synthetic construct
  misc_feature 1..23: note = Synthetic
  source 1..23: mol_type = other RNA
cgctatgtaccatgctcgatacc

SEQ ID NO: 17099 - RNA, 24 nt, synthetic construct
  misc_feature 1..24: note = Synthetic
  source 1..24: mol_type = other RNA
gcgctatgtaccatgctcgatacc

SEQ ID NO: 17100 - RNA, 18 nt, synthetic construct
  misc_feature 1..18: note = Synthetic
  source 1..18: mol_type = other RNA
cggccacccgcgacggcc

SEQ ID NO: 17101 - RNA, 19 nt, synthetic construct
  misc_feature 1..19: note = Synthetic
  source 1..19: mol_type = other RNA
ccggccacccgcgacggcc

SEQ ID NO: 17102 - RNA, 21 nt, synthetic construct
  misc_feature 1..21: note = Synthetic
  source 1..21: mol_type = other RNA
ttccggccacccgcgacggcc

SEQ ID NO: 17103 - RNA, 22 nt, synthetic construct
  misc_feature 1..22: note = Synthetic
  source 1..22: mol_type = other RNA
cttccggccacccgcgacggcc

SEQ ID NO: 17104 - RNA, 23 nt, synthetic construct
  misc_feature 1..23: note = Synthetic
  source 1..23: mol_type = other RNA
gcttccggccacccgcgacggcc

SEQ ID NO: 17105 - RNA, 24 nt, synthetic construct
  misc_feature 1..24: note = Synthetic
  source 1..24: mol_type = other RNA
cgcttccggccacccgcgacggcc

SEQ ID NO: 17106 - RNA, 18 nt, synthetic construct
  misc_feature 1..18: note = Synthetic
  source 1..18: mol_type = other RNA
ggggggacgcgtacgtcc

SEQ ID NO: 17107 - RNA, 19 nt, synthetic construct
  misc_feature 1..19: note = Synthetic
  source 1..19: mol_type = other RNA
tggggggacgcgtacgtcc

SEQ ID NO: 17108 - RNA, 21 nt, synthetic construct
  misc_feature 1..21: note = Synthetic
  source 1..21: mol_type = other RNA
aatggggggacgcgtacgtcc

SEQ ID NO: 17109 - RNA, 22 nt, synthetic construct
  misc_feature 1..22: note = Synthetic
  source 1..22: mol_type = other RNA
gaatggggggacgcgtacgtcc

SEQ ID NO: 17110 - RNA, 23 nt, synthetic construct
  misc_feature 1..23: note = Synthetic
  source 1..23: mol_type = other RNA
ggaatggggggacgcgtacgtcc

SEQ ID NO: 17111 - RNA, 24 nt, synthetic construct
  misc_feature 1..24: note = Synthetic
  source 1..24: mol_type = other RNA
tggaatggggggacgcgtacgtcc

SEQ ID NO: 17112 - RNA, 18 nt, synthetic construct
  misc_feature 1..18: note = Synthetic
  source 1..18: mol_type = other RNA
gacgacttgggctttagc

SEQ ID NO: 17113 - RNA, 19 nt, synthetic construct
  misc_feature 1..19: note = Synthetic
  source 1..19: mol_type = other RNA
cgacgacttgggctttagc

SEQ ID NO: 17114 - RNA, 21 nt, synthetic construct
  misc_feature 1..21: note = Synthetic
  source 1..21: mol_type = other RNA
ctcgacgacttgggctttagc

SEQ ID NO: 17115 - RNA, 22 nt, synthetic construct
  misc_feature 1..22: note = Synthetic
  source 1..22: mol_type = other RNA
cctcgacgacttgggctttagc

SEQ ID NO: 17116 - RNA, 23 nt, synthetic construct
  misc_feature 1..23: note = Synthetic
  source 1..23: mol_type = other RNA
tcctcgacgacttgggctttagc

SEQ ID NO: 17117 - RNA, 24 nt, synthetic construct
  misc_feature 1..24: note = Synthetic
  source 1..24: mol_type = other RNA
ctcctcgacgacttgggctttagc

SEQ ID NO: 17118 - RNA, 18 nt, synthetic construct
  misc_feature 1..18: note = Synthetic
  source 1..18: mol_type = other RNA
acgccgagctacgggcgc

SEQ ID NO: 17119 - RNA, 19 nt, synthetic construct
  misc_feature 1..19: note = Synthetic
  source 1..19: mol_type = other RNA
cacgccgagctacgggcgc

SEQ ID NO: 17120 - RNA, 21 nt, synthetic construct
  misc_feature 1..21: note = Synthetic
  source 1..21: mol_type = other RNA
tccacgccgagctacgggcgc

SEQ ID NO: 17121 - RNA, 22 nt, synthetic construct
  misc_feature 1..22: note = Synthetic
  source 1..22: mol_type = other RNA
ttccacgccgagctacgggcgc

SEQ ID NO: 17122 - RNA, 23 nt, synthetic construct
  misc_feature 1..23: note = Synthetic
  source 1..23: mol_type = other RNA
cttccacgccgagctacgggcgc

SEQ ID NO: 17123 - RNA, 24 nt, synthetic construct
  misc_feature 1..24: note = Synthetic
  source 1..24: mol_type = other RNA
tcttccacgccgagctacgggcgc

SEQ ID NO: 17124 - RNA, 18 nt, synthetic construct
  misc_feature 1..18: note = Synthetic
  source 1..18: mol_type = other RNA
ctgtacgcaacggggcgc

SEQ ID NO: 17125 - RNA, 19 nt, synthetic construct
  misc_feature 1..19: note = Synthetic
  source 1..19: mol_type = other RNA
gctgtacgcaacggggcgc

SEQ ID NO: 17126 - RNA, 21 nt, synthetic construct
  misc_feature 1..21: note = Synthetic
  source 1..21: mol_type = other RNA
ccgctgtacgcaacggggcgc

SEQ ID NO: 17127 - RNA, 22 nt, synthetic construct
  misc_feature 1..22: note = Synthetic
  source 1..22: mol_type = other RNA
cccgctgtacgcaacggggcgc

SEQ ID NO: 17128 - RNA, 23 nt, synthetic construct
  misc_feature 1..23: note = Synthetic
  source 1..23: mol_type = other RNA
ccccgctgtacgcaacggggcgc

SEQ ID NO: 17129 - RNA, 24 nt, synthetic construct
  misc_feature 1..24: note = Synthetic
  source 1..24: mol_type = other RNA
cccccgctgtacgcaacggggcgc

SEQ ID NO: 17130 - RNA, 18 nt, synthetic construct
  misc_feature 1..18: note = Synthetic
  source 1..18: mol_type = other RNA
accgcccccccgcccggc

SEQ ID NO: 17131 - RNA, 19 nt, synthetic construct
  misc_feature 1..19: note = Synthetic
  source 1..19: mol_type = other RNA
caccgcccccccgcccggc

SEQ ID NO: 17132 - RNA, 21 nt, synthetic construct
  misc_feature 1..21: note = Synthetic
  source 1..21: mol_type = other RNA
gccaccgcccccccgcccggc

SEQ ID NO: 17133 - RNA, 22 nt, synthetic construct
  misc_feature 1..22: note = Synthetic
  source 1..22: mol_type = other RNA
cgccaccgcccccccgcccggc

SEQ ID NO: 17134 - RNA, 23 nt, synthetic construct
  misc_feature 1..23: note = Synthetic
  source 1..23: mol_type = other RNA
tcgccaccgcccccccgcccggc

SEQ ID NO: 17135 - RNA, 24 nt, synthetic construct
  misc_feature 1..24: note = Synthetic
  source 1..24: mol_type = other RNA
ttcgccaccgcccccccgcccggc

SEQ ID NO: 17136 - RNA, 18 nt, synthetic construct
  misc_feature 1..18: note = Synthetic
  source 1..18: mol_type = other RNA
ccacgccgagctacgggc

SEQ ID NO: 17137 - RNA, 19 nt, synthetic construct
  misc_feature 1..19: note = Synthetic
  source 1..19: mol_type = other RNA
tccacgccgagctacgggc

SEQ ID NO: 17138 - RNA, 21 nt, synthetic construct
  misc_feature 1..21: note = Synthetic
  source 1..21: mol_type = other RNA
cttccacgccgagctacgggc

SEQ ID NO: 17139 - RNA, 22 nt, synthetic construct
  misc_feature 1..22: note = Synthetic
  source 1..22: mol_type = other RNA
tcttccacgccgagctacgggc

SEQ ID NO: 17140 - RNA, 23 nt, synthetic construct
  misc_feature 1..23: note = Synthetic
  source 1..23: mol_type = other RNA
ttcttccacgccgagctacgggc

SEQ ID NO: 17141 - RNA, 24 nt, synthetic construct
  misc_feature 1..24: note = Synthetic
  source 1..24: mol_type = other RNA
tttcttccacgccgagctacgggc

SEQ ID NO: 17142 - RNA, 18 nt, synthetic construct
  misc_feature 1..18: note = Synthetic
  source 1..18: mol_type = other RNA
gagctacgggcgcgggag

SEQ ID NO: 17143 - RNA, 19 nt, synthetic construct
  misc_feature 1..19: note = Synthetic
  source 1..19: mol_type = other RNA
cgagctacgggcgcgggag

SEQ ID NO: 17144 - RNA, 21 nt, synthetic construct
  misc_feature 1..21: note = Synthetic
  source 1..21: mol_type = other RNA
gccgagctacgggcgcgggag

SEQ ID NO: 17145 - RNA, 22 nt, synthetic construct
  misc_feature 1..22: note = Synthetic
  source 1..22: mol_type = other RNA
cgccgagctacgggcgcgggag

SEQ ID NO: 17146 - RNA, 23 nt, synthetic construct
  misc_feature 1..23: note = Synthetic
  source 1..23: mol_type = other RNA
acgccgagctacgggcgcgggag

SEQ ID NO: 17147 - RNA, 24 nt, synthetic construct
  misc_feature 1..24: note = Synthetic
  source 1..24: mol_type = other RNA
cacgccgagctacgggcgcgggag

SEQ ID NO: 17148 - RNA, 18 nt, synthetic construct
  misc_feature 1..18: note = Synthetic
  source 1..18: mol_type = other RNA
tctctcgtttcttccacg

SEQ ID NO: 17149 - RNA, 19 nt, synthetic construct
  misc_feature 1..19: note = Synthetic
  source 1..19: mol_type = other RNA
ctctctcgtttcttccacg

SEQ ID NO: 17150 - RNA, 21 nt, synthetic construct
  misc_feature 1..21: note = Synthetic
  source 1..21: mol_type = other RNA
cgctctctcgtttcttccacg

SEQ ID NO: 17151 - RNA, 22 nt, synthetic construct
  misc_feature 1..22: note = Synthetic
  source 1..22: mol_type = other RNA
gcgctctctcgtttcttccacg

SEQ ID NO: 17152 - RNA, 23 nt, synthetic construct
  misc_feature 1..23: note = Synthetic
  source 1..23: mol_type = other RNA
agcgctctctcgtttcttccacg

SEQ ID NO: 17153 - RNA, 24 nt, synthetic construct
  misc_feature 1..24: note = Synthetic
  source 1..24: mol_type = other RNA
aagcgctctctcgtttcttccacg

SEQ ID NO: 17154 - RNA, 18 nt, synthetic construct
  misc_feature 1..18: note = Synthetic
  source 1..18: mol_type = other RNA
cacgccgagctacgggcg

SEQ ID NO: 17155 - RNA, 19 nt, synthetic construct
  misc_feature 1..19: note = Synthetic
  source 1..19: mol_type = other RNA
ccacgccgagctacgggcg

SEQ ID NO: 17156 - RNA, 21 nt, synthetic construct
  misc_feature 1..21: note = Synthetic
  source 1..21: mol_type = other RNA
ttccacgccgagctacgggcg

SEQ ID NO: 17157 - RNA, 22 nt, synthetic construct
  misc_feature 1..22: note = Synthetic
  source 1..22: mol_type = other RNA
cttccacgccgagctacgggcg

SEQ ID NO: 17158 - RNA, 23 nt, synthetic construct
  misc_feature 1..23: note = Synthetic
  source 1..23: mol_type = other RNA
tcttccacgccgagctacgggcg

SEQ ID NO: 17159 - RNA, 24 nt, synthetic construct
  misc_feature 1..24: note = Synthetic
  source 1..24: mol_type = other RNA
ttcttccacgccgagctacgggcg

SEQ ID NO: 17160 - RNA, 18 nt, synthetic construct
  misc_feature 1..18: note = Synthetic
  source 1..18: mol_type = other RNA
caatggacctcttggtcg

SEQ ID NO: 17161 - RNA, 19 nt, synthetic construct
  misc_feature 1..19: note = Synthetic
  source 1..19: mol_type = other RNA
ccaatggacctcttggtcg

SEQ ID NO: 17162 - RNA, 20 nt, synthetic construct
  misc_feature 1..20: note = Synthetic
  source 1..20: mol_type = other RNA
cccaatggacctcttggtcg

SEQ ID NO: 17163 - RNA, 21 nt, synthetic construct
  misc_feature 1..21: note = Synthetic
  source 1..21: mol_type = other RNA
acccaatggacctcttggtcg

SEQ ID NO: 17164 - RNA, 22 nt, synthetic construct
  misc_feature 1..22: note = Synthetic
  source 1..22: mol_type = other RNA
cacccaatggacctcttggtcg

SEQ ID NO: 17165 - RNA, 23 nt, synthetic construct
  misc_feature 1..23: note = Synthetic
  source 1..23: mol_type = other RNA
ccacccaatggacctcttggtcg

SEQ ID NO: 17166 - RNA, 24 nt, synthetic construct
  misc_feature 1..24: note = Synthetic
  source 1..24: mol_type = other RNA
cccacccaatggacctcttggtcg

SEQ ID NO: 17167 - RNA, 18 nt, synthetic construct
  misc_feature 1..18: note = Synthetic
  source 1..18: mol_type = other RNA
caccgcccccccgcccgg

SEQ ID NO: 17168 - RNA, 19 nt, synthetic construct
  misc_feature 1..19: note = Synthetic
  source 1..19: mol_type = other RNA
ccaccgcccccccgcccgg

SEQ ID NO: 17169 - RNA, 21 nt, synthetic construct
  misc_feature 1..21: note = Synthetic
  source 1..21: mol_type = other RNA
cgccaccgcccccccgcccgg

SEQ ID NO: 17170 - RNA, 22 nt, synthetic construct
  misc_feature 1..22: note = Synthetic
  source 1..22: mol_type = other RNA
tcgccaccgcccccccgcccgg

SEQ ID NO: 17171 - RNA, 23 nt, synthetic construct
  misc_feature 1..23: note = Synthetic
  source 1..23: mol_type = other RNA
ttcgccaccgcccccccgcccgg

SEQ ID NO: 17172 - RNA, 24 nt, synthetic construct
  misc_feature 1..24: note = Synthetic
  source 1..24: mol_type = other RNA
cttcgccaccgcccccccgcccgg

SEQ ID NO: 17173 - RNA, 18 nt, synthetic construct
  misc_feature 1..18: note = Synthetic
  source 1..18: mol_type = other RNA
gccgagctacgggcgcgg

SEQ ID NO: 17174 - RNA, 19 nt, synthetic construct
  misc_feature 1..19: note = Synthetic
  source 1..19: mol_type = other RNA
cgccgagctacgggcgcgg

SEQ ID NO: 17175 - RNA, 21 nt, synthetic construct
  misc_feature 1..21: note = Synthetic
  source 1..21: mol_type = other RNA
cacgccgagctacgggcgcgg

SEQ ID NO: 17176 - RNA, 22 nt, synthetic construct
  misc_feature 1..22: note = Synthetic
  source 1..22: mol_type = other RNA
ccacgccgagctacgggcgcgg

SEQ ID NO: 17177 - RNA, 23 nt, synthetic construct
  misc_feature 1..23: note = Synthetic
  source 1..23: mol_type = other RNA
tccacgccgagctacgggcgcgg

SEQ ID NO: 17178 - RNA, 24 nt, synthetic construct
  misc_feature 1..24: note = Synthetic
  source 1..24: mol_type = other RNA
ttccacgccgagctacgggcgcgg

SEQ ID NO: 17179 - RNA, 18 nt, synthetic construct
  misc_feature 1..18: note = Synthetic
  source 1..18: mol_type = other RNA
ccgagctacgggcgcggg

SEQ ID NO: 17180 - RNA, 19 nt, synthetic construct
  misc_feature 1..19: note = Synthetic
  source 1..19: mol_type = other RNA
gccgagctacgggcgcggg

SEQ ID NO: 17181 - RNA, 21 nt, synthetic construct
  misc_feature 1..21: note = Synthetic
  source 1..21: mol_type = other RNA
acgccgagctacgggcgcggg

SEQ ID NO: 17182 - RNA, 22 nt, synthetic construct
  misc_feature 1..22: note = Synthetic
  source 1..22: mol_type = other RNA
cacgccgagctacgggcgcggg

SEQ ID NO: 17183 - RNA, 23 nt, synthetic construct
  misc_feature 1..23: note = Synthetic
  source 1..23: mol_type = other RNA
ccacgccgagctacgggcgcggg

SEQ ID NO: 17184 - RNA, 24 nt, synthetic construct
  misc_feature 1..24: note = Synthetic
  source 1..24: mol_type = other RNA
tccacgccgagctacgggcgcggg

SEQ ID NO: 17185 - RNA, 18 nt, synthetic construct
  misc_feature 1..18: note = Synthetic
  source 1..18: mol_type = other RNA
agcgatgtggtggaatgg

SEQ ID NO: 17186 - RNA, 19 nt, synthetic construct
  misc_feature 1..19: note = Synthetic
  source 1..19: mol_type = other RNA
cagcgatgtggtggaatgg

SEQ ID NO: 17187 - RNA, 21 nt, synthetic construct
  misc_feature 1..21: note = Synthetic
  source 1..21: mol_type = other RNA
cccagcgatgtggtggaatgg

SEQ ID NO: 17188 - RNA, 22 nt, synthetic construct
  misc_feature 1..22: note = Synthetic
  source 1..22: mol_type = other RNA
gcccagcgatgtggtggaatgg

SEQ ID NO: 17189 - RNA, 23 nt, synthetic construct
  misc_feature 1..23: note = Synthetic
  source 1..23: mol_type = other RNA
tgcccagcgatgtggtggaatgg

SEQ ID NO: 17190 - RNA, 24 nt, synthetic construct
  misc_feature 1..24: note = Synthetic
  source 1..24: mol_type = other RNA
ctgcccagcgatgtggtggaatgg

SEQ ID NO: 17191 - RNA, 18 nt, synthetic construct
  misc_feature 1..18: note = Synthetic
  source 1..18: mol_type = other RNA
cagcgatgtggtggaatg

SEQ ID NO: 17192 - RNA, 19 nt, synthetic construct
  misc_feature 1..19: note = Synthetic
  source 1..19: mol_type = other RNA
ccagcgatgtggtggaatg

SEQ ID NO: 17193 - RNA, 21 nt, synthetic construct
  misc_feature 1..21: note = Synthetic
  source 1..21: mol_type = other RNA
gcccagcgatgtggtggaatg

SEQ ID NO: 17194 - RNA, 22 nt, synthetic construct
  misc_feature 1..22: note = Synthetic
  source 1..22: mol_type = other RNA
tgcccagcgatgtggtggaatg

SEQ ID NO: 17195 - RNA, 23 nt, synthetic construct
  misc_feature 1..23: note = Synthetic
  source 1..23: mol_type = other RNA
ctgcccagcgatgtggtggaatg

SEQ ID NO: 17196 - RNA, 24 nt, synthetic construct
  misc_feature 1..24: note = Synthetic
  source 1..24: mol_type = other RNA
gctgcccagcgatgtggtggaatg

SEQ ID NO: 17197 - RNA, 18 nt, synthetic construct
  misc_feature 1..18: note = Synthetic
  source 1..18: mol_type = other RNA
acgctgcccagcgatgtg

SEQ ID NO: 17198 - RNA, 19 nt, synthetic construct
  misc_feature 1..19: note = Synthetic
  source 1..19: mol_type = other RNA
aacgctgcccagcgatgtg

SEQ ID NO: 17199 - RNA, 21 nt, synthetic construct
  misc_feature 1..21: note = Synthetic
  source 1..21: mol_type = other RNA
tcaacgctgcccagcgatgtg

SEQ ID NO: 17200 - RNA, 22 nt, synthetic construct
  misc_feature 1..22: note = Synthetic
  source 1..22: mol_type = other RNA
atcaacgctgcccagcgatgtg

SEQ ID NO: 17201 - RNA, 23 nt, synthetic construct
  misc_feature 1..23: note = Synthetic
  source 1..23: mol_type = other RNA
tatcaacgctgcccagcgatgtg

SEQ ID NO: 17202 - RNA, 24 nt, synthetic construct
  misc_feature 1..24: note = Synthetic
  source 1..24: mol_type = other RNA
ctatcaacgctgcccagcgatgtg

SEQ ID NO: 17203 - RNA, 18 nt, synthetic construct
  misc_feature 1..18: note = Synthetic
  source 1..18: mol_type = other RNA
ccagcgatgtggtggaat

SEQ ID NO: 17204 - RNA, 19 nt, synthetic construct
  misc_feature 1..19: note = Synthetic
  source 1..19: mol_type = other RNA
cccagcgatgtggtggaat

SEQ ID NO: 17205 - RNA, 21 nt, synthetic construct
  misc_feature 1..21: note = Synthetic
  source 1..21: mol_type = other RNA
tgcccagcgatgtggtggaat

SEQ ID NO: 17206 - RNA, 22 nt, synthetic construct
  misc_feature 1..22: note = Synthetic
  source 1..22: mol_type = other RNA
ctgcccagcgatgtggtggaat

SEQ ID NO: 17207 - RNA, 23 nt, synthetic construct
  misc_feature 1..23: note = Synthetic
  source 1..23: mol_type = other RNA
gctgcccagcgatgtggtggaat

SEQ ID NO: 17208 - RNA, 24 nt, synthetic construct
  misc_feature 1..24: note = Synthetic
  source 1..24: mol_type = other RNA
cgctgcccagcgatgtggtggaat

SEQ ID NO: 17209 - RNA, 18 nt, synthetic construct
  misc_feature 1..18: note = Synthetic
  source 1..18: mol_type = other RNA
acggcctcgggctctact

SEQ ID NO: 17210 - RNA, 19 nt, synthetic construct
  misc_feature 1..19: note = Synthetic
  source 1..19: mol_type = other RNA
gacggcctcgggctctact

SEQ ID NO: 17211 - RNA, 21 nt, synthetic construct
  misc_feature 1..21: note = Synthetic
  source 1..21: mol_type = other RNA
gcgacggcctcgggctctact

SEQ ID NO: 17212 - RNA, 22 nt, synthetic construct
  misc_feature 1..22: note = Synthetic
  source 1..22: mol_type = other RNA
cgcgacggcctcgggctctact

SEQ ID NO: 17213 - RNA, 23 nt, synthetic construct
  misc_feature 1..23: note = Synthetic
  source 1..23: mol_type = other RNA
ccgcgacggcctcgggctctact

SEQ ID NO: 17214 - RNA, 24 nt, synthetic construct
  misc_feature 1..24: note = Synthetic
  source 1..24: mol_type = other RNA
cccgcgacggcctcgggctctact

SEQ ID NO: 17215 - RNA, 18 nt, synthetic construct
  misc_feature 1..18: note = Synthetic
  source 1..18: mol_type = other RNA
tttcttccacgccgagct

SEQ ID NO: 17216 - RNA, 19 nt, synthetic construct
  misc_feature 1..19: note = Synthetic
  source 1..19: mol_type = other RNA
gtttcttccacgccgagct

SEQ ID NO: 17217 - RNA, 21 nt, synthetic construct
  misc_feature 1..21: note = Synthetic
  source 1..21: mol_type = other RNA
tcgtttcttccacgccgagct

SEQ ID NO: 17218 - RNA, 22 nt, synthetic construct
  misc_feature 1..22: note = Synthetic
  source 1..22: mol_type = other RNA
ctcgtttcttccacgccgagct

SEQ ID NO: 17219 - RNA, 23 nt, synthetic construct
  misc_feature 1..23: note = Synthetic
  source 1..23: mol_type = other RNA
tctcgtttcttccacgccgagct

SEQ ID NO: 17220 - RNA, 24 nt, synthetic construct
  misc_feature 1..24: note = Synthetic
  source 1..24: mol_type = other RNA
ctctcgtttcttccacgccgagct

SEQ ID NO: 17221 - RNA, 19 nt, synthetic construct
  misc_feature 1..19: note = Synthetic
  source 1..19: mol_type = other RNA
gctcggcgtacgcggccca

SEQ ID NO: 17222 - RNA, 19 nt, synthetic construct
  misc_feature 1..19: note = Synthetic
  source 1..19: mol_type = other RNA
gagggcgaggtcgtgaagc

SEQ ID NO: 17223 - RNA, 21 nt, synthetic construct
  misc_feature 1..21: note = Synthetic
  source 1..21: mol_type = other RNA
ggaatacgagtccaacttcgc

SEQ ID NO: 17224 - RNA, 24 nt, synthetic construct
  misc_feature 1..24: note = Synthetic
  source 1..24: mol_type = other RNA
gctggaatacgagtccaacttcgc

SEQ ID NO: 17225 - RNA, 19 nt, synthetic construct
  misc_feature 1..19: note = Synthetic
  source 1..19: mol_type = other RNA
gcgggaggttaaggtgctc

SEQ ID NO: 17226 - RNA, 21 nt, synthetic construct
  misc_feature 1..21: note = Synthetic
  source 1..21: mol_type = other RNA
gtacgcggcccataggatctc

SEQ ID NO: 17227 - RNA, 23 nt, synthetic construct
  misc_feature 1..23: note = Synthetic
  source 1..23: mol_type = other RNA
gcgtacgcggcccataggatctc

SEQ ID NO: 17228 - RNA, 24 nt, synthetic construct
  misc_feature 1..24: note = Synthetic
  source 1..24: mol_type = other RNA
ggcgtacgcggcccataggatctc

SEQ ID NO: 17229 - RNA, 18 nt, synthetic construct
  misc_feature 1..18: note = Synthetic
  source 1..18: mol_type = other RNA
gggtaaatcccggccccg

SEQ ID NO: 17230 - RNA, 19 nt, synthetic construct
  misc_feature 1..19: note = Synthetic
  source 1..19: mol_type = other RNA
ggggtaaatcccggccccg

SEQ ID NO: 17231 - RNA, 21 nt, synthetic construct
  misc_feature 1..21: note = Synthetic
  source 1..21: mol_type = other RNA
ggggggtaaatcccggccccg

SEQ ID NO: 17232 - RNA, 23 nt, synthetic construct
  misc_feature 1..23: note = Synthetic
  source 1..23: mol_type = other RNA
gtggggggtaaatcccggccccg

SEQ ID NO: 17233 - RNA, 18 nt, synthetic construct
  misc_feature 1..18: note = Synthetic
  source 1..18: mol_type = other RNA
gttgccatgcagggtggg

SEQ ID NO: 17234 - RNA, 19 nt, synthetic construct
  misc_feature 1..19: note = Synthetic
  source 1..19: mol_type = other RNA
ggttgccatgcagggtggg

SEQ ID NO: 17235 - RNA, 23 nt, synthetic construct
  misc_feature 1..23: note = Synthetic
  source 1..23: mol_type = other RNA
gcctggttgccatgcagggtggg

SEQ ID NO: 17236 - RNA, 24 nt, synthetic construct
  misc_feature 1..24: note = Synthetic
  source 1..24: mol_type = other RNA
ggcctggttgccatgcagggtggg

SEQ ID NO: 17237 - RNA, 18 nt, synthetic construct
  misc_feature 1..18: note = Synthetic
  source 1..18: mol_type = other RNA
gcgggcctggttgccatg

SEQ ID NO: 17238 - RNA, 21 nt, synthetic construct
  misc_feature 1..21: note = Synthetic
  source 1..21: mol_type = other RNA
ggcgcgggcctggttgccatg

SEQ ID NO: 17239 - RNA, 23 nt, synthetic construct
  misc_feature 1..23: note = Synthetic
  source 1..23: mol_type = other RNA
gaggcgcgggcctggttgccatg

SEQ ID NO: 17240 - RNA, 18 nt, synthetic construct
  misc_feature 1..18: note = Synthetic
  source 1..18: mol_type = other RNA
gtagggggcggagtcgtg

SEQ ID NO: 17241 - RNA, 21 nt, synthetic construct
  misc_feature 1..21: note = Synthetic
  source 1..21: mol_type = other RNA
gccgtagggggcggagtcgtg

SEQ ID NO: 17242 - RNA, 23 nt, synthetic construct
  misc_feature 1..23: note = Synthetic
  source 1..23: mol_type = other RNA
gcgccgtagggggcggagtcgtg

SEQ ID NO: 17243 - RNA, 19 nt, synthetic construct
  misc_feature 1..19: note = Synthetic
  source 1..19: mol_type = other RNA
gaggtcgtgaagctggaat

SEQ ID NO: 17244 - RNA, 21 nt, synthetic construct
  misc_feature 1..21: note = Synthetic
  source 1..21: mol_type = other RNA
gcgaggtcgtgaagctggaat

SEQ ID NO: 17245 - RNA, 22 nt, synthetic construct
  misc_feature 1..22: note = Synthetic
  source 1..22: mol_type = other RNA
ggcgaggtcgtgaagctggaat

SEQ ID NO: 17246 - RNA, 23 nt, synthetic construct
  misc_feature 1..23: note = Synthetic
  source 1..23: mol_type = other RNA
gggcgaggtcgtgaagctggaat

SEQ ID NO: 17247 - RNA, 21 nt, synthetic construct
  misc_feature 1..21: note = Synthetic
  source 1..21: mol_type = other RNA
gatctggacatgttgggggac

SEQ ID NO: 17248 - RNA, 19 nt, synthetic construct
  misc_feature 1..19: note = Synthetic
  source 1..19: mol_type = other RNA
gacggggattccccggggc

SEQ ID NO: 17249 - RNA, 21 nt, synthetic construct
  misc_feature 1..21: note = Synthetic
  source 1..21: mol_type = other RNA
gggacggggattccccggggc

SEQ ID NO: 17250 - RNA, 22 nt, synthetic construct
  misc_feature 1..22: note = Synthetic
  source 1..22: mol_type = other RNA
ggggacggggattccccggggc

SEQ ID NO: 17251 - RNA, 23 nt, synthetic construct
  misc_feature 1..23: note = Synthetic
  source 1..23: mol_type = other RNA
gggggacggggattccccggggc

SEQ ID NO: 17252 - RNA, 22 nt, synthetic construct
  misc_feature 1..22: note = Synthetic
  source 1..22: mol_type = other RNA
gcccttggaattgacgagtacg

SEQ ID NO: 17253 - RNA, 23 nt, synthetic construct
  misc_feature 1..23: note = Synthetic
  source 1..23: mol_type = other RNA
gtcaacggagcgctcaccgtccg

SEQ ID NO: 17254 - RNA, 23 nt, synthetic construct
  misc_feature 1..23: note = Synthetic
  source 1..23: mol_type = other RNA
gtttaccgatgcccttggaattg

SEQ ID NO: 17255 - RNA, 18 nt, synthetic construct
  misc_feature 1..18: note = Synthetic
  source 1..18: mol_type = other RNA
gagagctggcgtcagttg

SEQ ID NO: 17256 - RNA, 19 nt, synthetic construct
  misc_feature 1..19: note = Synthetic
  source 1..19: mol_type = other RNA
ggagagctggcgtcagttg

SEQ ID NO: 17257 - RNA, 24 nt, synthetic construct
  misc_feature 1..24: note = Synthetic
  source 1..24: mol_type = other RNA
gacctggagagctggcgtcagttg

SEQ ID NO: 17258 - RNA, 19 nt, synthetic construct
  misc_feature 1..19: note = Synthetic
  source 1..19: mol_type = other RNA
gctctggatatggccgact

SEQ ID NO: 17259 - RNA, 21 nt, synthetic construct
  misc_feature 1..21: note = Synthetic
  source 1..21: mol_type = other RNA
gcgctctggatatggccgact

SEQ ID NO: 17260 - RNA, 22 nt, synthetic construct
  misc_feature 1..22: note = Synthetic
  source 1..22: mol_type = other RNA
ggcgctctggatatggccgact

SEQ ID NO: 17261 - RNA, 18 nt, synthetic construct
  misc_feature 1..18: note = Synthetic
  source 1..18: mol_type = other RNA
gatgtttaccgatgccct

SEQ ID NO: 17262 - RNA, 21 nt, synthetic construct
  misc_feature 1..21: note = Synthetic
  source 1..21: mol_type = other RNA
gcagatgtttaccgatgccct

SEQ ID NO: 17263 - RNA, 23 nt, synthetic construct
  misc_feature 1..23: note = Synthetic
  source 1..23: mol_type = other RNA
gagcagatgtttaccgatgccct

SEQ ID NO: 17264 - RNA, 18 nt, synthetic construct
  misc_feature 1..18: note = Synthetic
  source 1..18: mol_type = other RNA
gcaaccaggcccgcgcct

SEQ ID NO: 17265 - RNA, 19 nt, synthetic construct
  misc_feature 1..19: note = Synthetic
  source 1..19: mol_type = other RNA
ggcaaccaggcccgcgcct

SEQ ID NO: 17266 - RNA, 23 nt, synthetic construct
  misc_feature 1..23: note = Synthetic
  source 1..23: mol_type = other RNA
gcatggcaaccaggcccgcgcct

SEQ ID NO: 17267 - RNA, 21 nt, synthetic construct
  misc_feature 1..21: note = Synthetic
  source 1..21: mol_type = other RNA
gactccgccccctacggcgct

SEQ ID NO: 17268 - RNA, 19 nt, synthetic construct
  misc_feature 1..19: note = Synthetic
  source 1..19: mol_type = other RNA
gcgcgtacgaaaaacaatt

SEQ ID NO: 17269 - RNA, 21 nt, synthetic construct
  misc_feature 1..21: note = Synthetic
  source 1..21: mol_type = other RNA
gcgcgcgtacgaaaaacaatt

SEQ ID NO: 17270 - RNA, 24 nt, synthetic construct
  misc_feature 1..24: note = Synthetic
  source 1..24: mol_type = other RNA
gccgcgcgcgtacgaaaaacaatt

SEQ ID NO: 17271 - RNA, 18 nt, synthetic construct
  misc_feature 1..18: note = Synthetic
  source 1..18: mol_type = other RNA
ctcggcgtacgcggccca

SEQ ID NO: 17272 - RNA, 21 nt, synthetic construct
  misc_feature 1..21: note = Synthetic
  source 1..21: mol_type = other RNA
ctgctcggcgtacgcggccca

SEQ ID NO: 17273 - RNA, 22 nt, synthetic construct
  misc_feature 1..22: note = Synthetic
  source 1..22: mol_type = other RNA
tctgctcggcgtacgcggccca

SEQ ID NO: 17274 - RNA, 23 nt, synthetic construct
  misc_feature 1..23: note = Synthetic
  source 1..23: mol_type = other RNA
atctgctcggcgtacgcggccca

SEQ ID NO: 17275 - RNA, 24 nt, synthetic construct
  misc_feature 1..24: note = Synthetic
  source 1..24: mol_type = other RNA
catctgctcggcgtacgcggccca

SEQ ID NO: 17276 - RNA, 18 nt, synthetic construct
  misc_feature 1..18: note = Synthetic
  source 1..18: mol_type = other RNA
agggcgaggtcgtgaagc

SEQ ID NO: 17277 - RNA, 21 nt, synthetic construct
  misc_feature 1..21: note = Synthetic
  source 1..21: mol_type = other RNA
cggagggcgaggtcgtgaagc

SEQ ID NO: 17278 - RNA, 22 nt, synthetic construct
  misc_feature 1..22: note = Synthetic
  source 1..22: mol_type = other RNA
tcggagggcgaggtcgtgaagc

SEQ ID NO: 17279 - RNA, 23 nt, synthetic construct
  misc_feature 1..23: note = Synthetic
  source 1..23: mol_type = other RNA
ctcggagggcgaggtcgtgaagc

SEQ ID NO: 17280 - RNA, 24 nt, synthetic construct
  misc_feature 1..24: note = Synthetic
  source 1..24: mol_type = other RNA
cctcggagggcgaggtcgtgaagc

SEQ ID NO: 17281 - RNA, 18 nt, synthetic construct
  misc_feature 1..18: note = Synthetic
  source 1..18: mol_type = other RNA
atacgagtccaacttcgc

SEQ ID NO: 17282 - RNA, 19 nt, synthetic construct
  misc_feature 1..19: note = Synthetic
  source 1..19: mol_type = other RNA
aatacgagtccaacttcgc

SEQ ID NO: 17283 - RNA, 22 nt, synthetic construct
  misc_feature 1..22: note = Synthetic
  source 1..22: mol_type = other RNA
tggaatacgagtccaacttcgc

SEQ ID NO: 17284 - RNA, 23 nt, synthetic construct
  misc_feature 1..23: note = Synthetic
  source 1..23: mol_type = other RNA
ctggaatacgagtccaacttcgc

SEQ ID NO: 17285 - RNA, 18 nt, synthetic construct
  misc_feature 1..18: note = Synthetic
  source 1..18: mol_type = other RNA
cgggaggttaaggtgctc

SEQ ID NO: 17286 - RNA, 21 nt, synthetic construct
  misc_feature 1..21: note = Synthetic
  source 1..21: mol_type = other RNA
cagcgggaggttaaggtgctc

SEQ ID NO: 17287 - RNA, 22 nt, synthetic construct
  misc_feature 1..22: note = Synthetic
  source 1..22: mol_type = other RNA
ccagcgggaggttaaggtgctc

SEQ ID NO: 17288 - RNA, 23 nt, synthetic construct
  misc_feature 1..23: note = Synthetic
  source 1..23: mol_type = other RNA
accagcgggaggttaaggtgctc

SEQ ID NO: 17289 - RNA, 24 nt, synthetic construct
  misc_feature 1..24: note = Synthetic
  source 1..24: mol_type = other RNA
caccagcgggaggttaaggtgctc

SEQ ID NO: 17290 - RNA, 18 nt, synthetic construct
  misc_feature 1..18: note = Synthetic
  source 1..18: mol_type = other RNA
cgcggcccataggatctc

SEQ ID NO: 17291 - RNA, 19 nt, synthetic construct
  misc_feature 1..19: note = Synthetic
  source 1..19: mol_type = other RNA
acgcggcccataggatctc

SEQ ID NO: 17292 - RNA, 22 nt, synthetic construct
  misc_feature 1..22: note = Synthetic
  source 1..22: mol_type = other RNA
cgtacgcggcccataggatctc

SEQ ID NO: 17293 - RNA, 22 nt, synthetic construct
  misc_feature 1..22: note = Synthetic
  source 1..22: mol_type = other RNA
tggggggtaaatcccggccccg

SEQ ID NO: 17294 - RNA, 24 nt, synthetic construct
  misc_feature 1..24: note = Synthetic
  source 1..24: mol_type = other RNA
cgtggggggtaaatcccggccccg

SEQ ID NO: 17295 - RNA, 18 nt, synthetic construct
  misc_feature 1..18: note = Synthetic
  source 1..18: mol_type = other RNA
ccagagcgccgtaggggg

SEQ ID NO: 17296 - RNA, 19 nt, synthetic construct
  misc_feature 1..19: note = Synthetic
  source 1..19: mol_type = other RNA
tccagagcgccgtaggggg

SEQ ID NO: 17297 - RNA, 21 nt, synthetic construct
  misc_feature 1..21: note = Synthetic
  source 1..21: mol_type = other RNA
tatccagagcgccgtaggggg

SEQ ID NO: 17298 - RNA, 22 nt, synthetic construct
  misc_feature 1..22: note = Synthetic
  source 1..22: mol_type = other RNA
atatccagagcgccgtaggggg

SEQ ID NO: 17299 - RNA, 23 nt, synthetic construct
  misc_feature 1..23: note = Synthetic
  source 1..23: mol_type = other RNA
catatccagagcgccgtaggggg

SEQ ID NO: 17300 - RNA, 24 nt, synthetic construct
  misc_feature 1..24: note = Synthetic
  source 1..24: mol_type = other RNA
ccatatccagagcgccgtaggggg

SEQ ID NO: 17301 - RNA, 21 nt, synthetic construct
  misc_feature 1..21: note = Synthetic
  source 1..21: mol_type = other RNA
ctggttgccatgcagggtggg

SEQ ID NO: 17302 - RNA, 22 nt, synthetic construct
  misc_feature 1..22: note = Synthetic
  source 1..22: mol_type = other RNA
cctggttgccatgcagggtggg

SEQ ID NO: 17303 - RNA, 19 nt, synthetic construct
  misc_feature 1..19: note = Synthetic
  source 1..19: mol_type = other RNA
cgcgggcctggttgccatg

SEQ ID NO: 17304 - RNA, 22 nt, synthetic construct
  misc_feature 1..22: note = Synthetic
  source 1..22: mol_type = other RNA
aggcgcgggcctggttgccatg

SEQ ID NO: 17305 - RNA, 24 nt, synthetic construct
  misc_feature 1..24: note = Synthetic
  source 1..24: mol_type = other RNA
agaggcgcgggcctggttgccatg

SEQ ID NO: 17306 - RNA, 19 nt, synthetic construct
  misc_feature 1..19: note = Synthetic
  source 1..19: mol_type = other RNA
cgtagggggcggagtcgtg

SEQ ID NO: 17307 - RNA, 22 nt, synthetic construct
  misc_feature 1..22: note = Synthetic
  source 1..22: mol_type = other RNA
cgccgtagggggcggagtcgtg

SEQ ID NO: 17308 - RNA, 24 nt, synthetic construct
  misc_feature 1..24: note = Synthetic
  source 1..24: mol_type = other RNA
agcgccgtagggggcggagtcgtg

SEQ ID NO: 17309 - RNA, 18 nt, synthetic construct
  misc_feature 1..18: note = Synthetic
  source 1..18: mol_type = other RNA
aggtcgtgaagctggaat

SEQ ID NO: 17310 - RNA, 24 nt, synthetic construct
  misc_feature 1..24: note = Synthetic
  source 1..24: mol_type = other RNA
agggcgaggtcgtgaagctggaat

SEQ ID NO: 17311 - RNA, 18 nt, synthetic construct
  misc_feature 1..18: note = Synthetic
  source 1..18: mol_type = other RNA
ctggacatgttgggggac

SEQ ID NO: 17312 - RNA, 19 nt, synthetic construct
  misc_feature 1..19: note = Synthetic
  source 1..19: mol_type = other RNA
tctggacatgttgggggac

SEQ ID NO: 17313 - RNA, 22 nt, synthetic construct
  misc_feature 1..22: note = Synthetic
  source 1..22: mol_type = other RNA
cgatctggacatgttgggggac

SEQ ID NO: 17314 - RNA, 23 nt, synthetic construct
  misc_feature 1..23: note = Synthetic
  source 1..23: mol_type = other RNA
tcgatctggacatgttgggggac

SEQ ID NO: 17315 - RNA, 24 nt, synthetic construct
  misc_feature 1..24: note = Synthetic
  source 1..24: mol_type = other RNA
ttcgatctggacatgttgggggac

SEQ ID NO: 17316 - RNA, 18 nt, synthetic construct
  misc_feature 1..18: note = Synthetic
  source 1..18: mol_type = other RNA
acggggattccccggggc

SEQ ID NO: 17317 - RNA, 24 nt, synthetic construct
  misc_feature 1..24: note = Synthetic
  source 1..24: mol_type = other RNA
tgggggacggggattccccggggc

SEQ ID NO: 17318 - RNA, 18 nt, synthetic construct
  misc_feature 1..18: note = Synthetic
  source 1..18: mol_type = other RNA
ttggaattgacgagtacg

SEQ ID NO: 17319 - RNA, 19 nt, synthetic construct
  misc_feature 1..19: note = Synthetic
  source 1..19: mol_type = other RNA
cttggaattgacgagtacg

SEQ ID NO: 17320 - RNA, 21 nt, synthetic construct
  misc_feature 1..21: note = Synthetic
  source 1..21: mol_type = other RNA
cccttggaattgacgagtacg

SEQ ID NO: 17321 - RNA, 23 nt, synthetic construct
  misc_feature 1..23: note = Synthetic
  source 1..23: mol_type = other RNA
tgcccttggaattgacgagtacg

SEQ ID NO: 17322 - RNA, 24 nt, synthetic construct
  misc_feature 1..24: note = Synthetic
  source 1..24: mol_type = other RNA
atgcccttggaattgacgagtacg

SEQ ID NO: 17323 - RNA, 18 nt, synthetic construct
  misc_feature 1..18: note = Synthetic
  source 1..18: mol_type = other RNA
cggagcgctcaccgtccg

SEQ ID NO: 17324 - RNA, 19 nt, synthetic construct
  misc_feature 1..19: note = Synthetic
  source 1..19: mol_type = other RNA
acggagcgctcaccgtccg

SEQ ID NO: 17325 - RNA, 21 nt, synthetic construct
  misc_feature 1..21: note = Synthetic
  source 1..21: mol_type = other RNA
caacggagcgctcaccgtccg

SEQ ID NO: 17326 - RNA, 22 nt, synthetic construct
  misc_feature 1..22: note = Synthetic
  source 1..22: mol_type = other RNA
tcaacggagcgctcaccgtccg

SEQ ID NO: 17327 - RNA, 24 nt, synthetic construct
  misc_feature 1..24: note = Synthetic
  source 1..24: mol_type = other RNA
cgtcaacggagcgctcaccgtccg

SEQ ID NO: 17328 - RNA, 18 nt, synthetic construct
  misc_feature 1..18: note = Synthetic
  source 1..18: mol_type = other RNA
ccgatgcccttggaattg

SEQ ID NO: 17329 - RNA, 19 nt, synthetic construct
  misc_feature 1..19: note = Synthetic
  source 1..19: mol_type = other RNA
accgatgcccttggaattg

SEQ ID NO: 17330 - RNA, 21 nt, synthetic construct
  misc_feature 1..21: note = Synthetic
  source 1..21: mol_type = other RNA
ttaccgatgcccttggaattg

SEQ ID NO: 17331 - RNA, 22 nt, synthetic construct
  misc_feature 1..22: note = Synthetic
  source 1..22: mol_type = other RNA
tttaccgatgcccttggaattg

SEQ ID NO: 17332 - RNA, 24 nt, synthetic construct
  misc_feature 1..24: note = Synthetic
  source 1..24: mol_type = other RNA
tgtttaccgatgcccttggaattg

SEQ ID NO: 17333 - RNA, 21 nt, synthetic construct
  misc_feature 1..21: note = Synthetic
  source 1..21: mol_type = other RNA
ctggagagctggcgtcagttg

SEQ ID NO: 17334 - RNA, 22 nt, synthetic construct
  misc_feature 1..22: note = Synthetic
  source 1..22: mol_type = other RNA
cctggagagctggcgtcagttg

SEQ ID NO: 17335 - RNA, 23 nt, synthetic construct
  misc_feature 1..23: note = Synthetic
  source 1..23: mol_type = other RNA
acctggagagctggcgtcagttg

SEQ ID NO: 17336 - RNA, 18 nt, synthetic construct
  misc_feature 1..18: note = Synthetic
  source 1..18: mol_type = other RNA
ctctggatatggccgact

SEQ ID NO: 17337 - RNA, 23 nt, synthetic construct
  misc_feature 1..23: note = Synthetic
  source 1..23: mol_type = other RNA
cggcgctctggatatggccgact

SEQ ID NO: 17338 - RNA, 24 nt, synthetic construct
  misc_feature 1..24: note = Synthetic
  source 1..24: mol_type = other RNA
acggcgctctggatatggccgact

SEQ ID NO: 17339 - RNA, 19 nt, synthetic construct
  misc_feature 1..19: note = Synthetic
  source 1..19: mol_type = other RNA
agatgtttaccgatgccct

SEQ ID NO: 17340 - RNA, 22 nt, synthetic construct
  misc_feature 1..22: note = Synthetic
  source 1..22: mol_type = other RNA
agcagatgtttaccgatgccct

SEQ ID NO: 17341 - RNA, 24 nt, synthetic construct
  misc_feature 1..24: note = Synthetic
  source 1..24: mol_type = other RNA
tgagcagatgtttaccgatgccct

SEQ ID NO: 17342 - RNA, 21 nt, synthetic construct
  misc_feature 1..21: note = Synthetic
  source 1..21: mol_type = other RNA
atggcaaccaggcccgcgcct

SEQ ID NO: 17343 - RNA, 22 nt, synthetic construct
  misc_feature 1..22: note = Synthetic
  source 1..22: mol_type = other RNA
catggcaaccaggcccgcgcct

SEQ ID NO: 17344 - RNA, 24 nt, synthetic construct
  misc_feature 1..24: note = Synthetic
  source 1..24: mol_type = other RNA
tgcatggcaaccaggcccgcgcct

SEQ ID NO: 17345 - RNA, 18 nt, synthetic construct
  misc_feature 1..18: note = Synthetic
  source 1..18: mol_type = other RNA
tccgccccctacggcgct

SEQ ID NO: 17346 - RNA, 19 nt, synthetic construct
  misc_feature 1..19: note = Synthetic
  source 1..19: mol_type = other RNA
ctccgccccctacggcgct

SEQ ID NO: 17347 - RNA, 22 nt, synthetic construct
  misc_feature 1..22: note = Synthetic
  source 1..22: mol_type = other RNA
cgactccgccccctacggcgct

SEQ ID NO: 17348 - RNA, 23 nt, synthetic construct
  misc_feature 1..23: note = Synthetic
  source 1..23: mol_type = other RNA
acgactccgccccctacggcgct

SEQ ID NO: 17349 - RNA, 24 nt, synthetic construct
  misc_feature 1..24: note = Synthetic
  source 1..24: mol_type = other RNA
cacgactccgccccctacggcgct

SEQ ID NO: 17350 - RNA, 18 nt, synthetic construct
  misc_feature 1..18: note = Synthetic
  source 1..18: mol_type = other RNA
cgcgtacgaaaaacaatt

SEQ ID NO: 17351 - RNA, 22 nt, synthetic construct
  misc_feature 1..22: note = Synthetic
  source 1..22: mol_type = other RNA
cgcgcgcgtacgaaaaacaatt

SEQ ID NO: 17352 - RNA, 23 nt, synthetic construct
  misc_feature 1..23: note = Synthetic
  source 1..23: mol_type = other RNA
ccgcgcgcgtacgaaaaacaatt

SEQ ID NO: 17353 - RNA, 18 nt, synthetic construct
  misc_feature 1..18: note = Synthetic
  source 1..18: mol_type = other RNA
cagctctccaggtcgcaa

SEQ ID NO: 17354 - RNA, 19 nt, synthetic construct
  misc_feature 1..19: note = Synthetic
  source 1..19: mol_type = other RNA
ccagctctccaggtcgcaa

SEQ ID NO: 17355 - RNA, 21 nt, synthetic construct
  misc_feature 1..21: note = Synthetic
  source 1..21: mol_type = other RNA
cgccagctctccaggtcgcaa

SEQ ID NO: 17356 - RNA, 22 nt, synthetic construct
  misc_feature 1..22: note = Synthetic
  source 1..22: mol_type = other RNA
acgccagctctccaggtcgcaa

SEQ ID NO: 17357 - RNA, 23 nt, synthetic construct
  misc_feature 1..23: note = Synthetic
  source 1..23: mol_type = other RNA
gacgccagctctccaggtcgcaa

SEQ ID NO: 17358 - RNA, 24 nt, synthetic construct
  misc_feature 1..24: note = Synthetic
  source 1..24: mol_type = other RNA
tgacgccagctctccaggtcgcaa

SEQ ID NO: 17359 - RNA, 18 nt, synthetic construct
  misc_feature 1..18: note = Synthetic
  source 1..18: mol_type = other RNA
cacgtcctcgccgtctaa

SEQ ID NO: 17360 - RNA, 19 nt, synthetic construct
  misc_feature 1..19: note = Synthetic
  source 1..19: mol_type = other RNA
ccacgtcctcgccgtctaa

SEQ ID NO: 17361 - RNA, 21 nt, synthetic construct
  misc_feature 1..21: note = Synthetic
  source 1..21: mol_type = other RNA
cgccacgtcctcgccgtctaa

SEQ ID NO: 17362 - RNA, 22 nt, synthetic construct
  misc_feature 1..22: note = Synthetic
  source 1..22: mol_type = other RNA
tcgccacgtcctcgccgtctaa

SEQ ID NO: 17363 - RNA, 23 nt, synthetic construct
  misc_feature 1..23: note = Synthetic
  source 1..23: mol_type = other RNA
atcgccacgtcctcgccgtctaa

SEQ ID NO: 17364 - RNA, 24 nt, synthetic construct
  misc_feature 1..24: note = Synthetic
  source 1..24: mol_type = other RNA
catcgccacgtcctcgccgtctaa

SEQ ID NO: 17365 - RNA, 18 nt, synthetic construct
  misc_feature 1..18: note = Synthetic
  source 1..18: mol_type = other RNA
tagccgcgctgcgcacca

SEQ ID NO: 17366 - RNA, 19 nt, synthetic construct
  misc_feature 1..19: note = Synthetic
  source 1..19: mol_type = other RNA
gtagccgcgctgcgcacca

SEQ ID NO: 17367 - RNA, 21 nt, synthetic construct
  misc_feature 1..21: note = Synthetic
  source 1..21: mol_type = other RNA
ccgtagccgcgctgcgcacca

SEQ ID NO: 17368 - RNA, 22 nt, synthetic construct
  misc_feature 1..22: note = Synthetic
  source 1..22: mol_type = other RNA
tccgtagccgcgctgcgcacca

SEQ ID NO: 17369 - RNA, 23 nt, synthetic construct
  misc_feature 1..23: note = Synthetic
  source 1..23: mol_type = other RNA
ctccgtagccgcgctgcgcacca

SEQ ID NO: 17370 - RNA, 24 nt, synthetic construct
  misc_feature 1..24: note = Synthetic
  source 1..24: mol_type = other RNA
cctccgtagccgcgctgcgcacca

SEQ ID NO: 17371 - RNA, 18 nt, synthetic construct
  misc_feature 1..18: note = Synthetic
  source 1..18: mol_type = other RNA
tcccccaacatgtccaga

SEQ ID NO: 17372 - RNA, 19 nt, synthetic construct
  misc_feature 1..19: note = Synthetic
  source 1..19: mol_type = other RNA
gtcccccaacatgtccaga

SEQ ID NO: 17373 - RNA, 21 nt, synthetic construct
  misc_feature 1..21: note = Synthetic
  source 1..21: mol_type = other RNA
ccgtcccccaacatgtccaga

SEQ ID NO: 17374 - RNA, 22 nt, synthetic construct
  misc_feature 1..22: note = Synthetic
  source 1..22: mol_type = other RNA
cccgtcccccaacatgtccaga

SEQ ID NO: 17375 - RNA, 23 nt, synthetic construct
  misc_feature 1..23: note = Synthetic
  source 1..23: mol_type = other RNA
ccccgtcccccaacatgtccaga

SEQ ID NO: 17376 - RNA, 24 nt, synthetic construct
  misc_feature 1..24: note = Synthetic
  source 1..24: mol_type = other RNA
tccccgtcccccaacatgtccaga

SEQ ID NO: 17377 - RNA, 18 nt, synthetic construct
  misc_feature 1..18: note = Synthetic
  source 1..18: mol_type = other RNA
gcgtcgtcgtccgggaga

SEQ ID NO: 17378 - RNA, 19 nt, synthetic construct
  misc_feature 1..19: note = Synthetic
  source 1..19: mol_type = other RNA
ggcgtcgtcgtccgggaga

SEQ ID NO: 17379 - RNA, 21 nt, synthetic construct
  misc_feature 1..21: note = Synthetic
  source 1..21: mol_type = other RNA
ggggcgtcgtcgtccgggaga

SEQ ID NO: 17380 - RNA, 22 nt, synthetic construct
  misc_feature 1..22: note = Synthetic
  source 1..22: mol_type = other RNA
gggggcgtcgtcgtccgggaga

SEQ ID NO: 17381 - RNA, 23 nt, synthetic construct
  misc_feature 1..23: note = Synthetic
  source 1..23: mol_type = other RNA
cgggggcgtcgtcgtccgggaga

SEQ ID NO: 17382 - RNA, 24 nt, synthetic construct
  misc_feature 1..24: note = Synthetic
  source 1..24: mol_type = other RNA
tcgggggcgtcgtcgtccgggaga

SEQ ID NO: 17383 - RNA, 18 nt, synthetic construct
  misc_feature 1..18: note = Synthetic
  source 1..18: mol_type = other RNA
gtgtgtcccgcggggaga

SEQ ID NO: 17384 - RNA, 19 nt, synthetic construct
  misc_feature 1..19: note = Synthetic
  source 1..19: mol_type = other RNA
cgtgtgtcccgcggggaga

SEQ ID NO: 17385 - RNA, 21 nt, synthetic construct
  misc_feature 1..21: note = Synthetic
  source 1..21: mol_type = other RNA
cgcgtgtgtcccgcggggaga

SEQ ID NO: 17386 - RNA, 22 nt, synthetic construct
  misc_feature 1..22: note = Synthetic
  source 1..22: mol_type = other RNA
gcgcgtgtgtcccgcggggaga

SEQ ID NO: 17387 - RNA, 23 nt, synthetic construct
  misc_feature 1..23: note = Synthetic
  source 1..23: mol_type = other RNA
tgcgcgtgtgtcccgcggggaga

SEQ ID NO: 17388 - RNA, 24 nt, synthetic construct
  misc_feature 1..24: note = Synthetic
  source 1..24: mol_type = other RNA
ctgcgcgtgtgtcccgcggggaga

SEQ ID NO: 17389 - RNA, 18 nt, synthetic construct
  misc_feature 1..18: note = Synthetic
  source 1..18: mol_type = other RNA
catatccagagcgccgta

SEQ ID NO: 17390 - RNA, 19 nt, synthetic construct
  misc_feature 1..19: note = Synthetic
  source 1..19: mol_type = other RNA
ccatatccagagcgccgta

SEQ ID NO: 17391 - RNA, 21 nt, synthetic construct
  misc_feature 1..21: note = Synthetic
  source 1..21: mol_type = other RNA
ggccatatccagagcgccgta

SEQ ID NO: 17392 - RNA, 22 nt, synthetic construct
  misc_feature 1..22: note = Synthetic
  source 1..22: mol_type = other RNA
cggccatatccagagcgccgta

SEQ ID NO: 17393 - RNA, 23 nt, synthetic construct
  misc_feature 1..23: note = Synthetic
  source 1..23: mol_type = other RNA
tcggccatatccagagcgccgta

SEQ ID NO: 17394 - RNA, 24 nt, synthetic construct
  misc_feature 1..24: note = Synthetic
  source 1..24: mol_type = other RNA
gtcggccatatccagagcgccgta

SEQ ID NO: 17395 - RNA, 18 nt, synthetic construct
  misc_feature 1..18: note = Synthetic
  source 1..18: mol_type = other RNA
ggcgcgcaggtaccggta

SEQ ID NO: 17396 - RNA, 19 nt, synthetic construct
  misc_feature 1..19: note = Synthetic
  source 1..19: mol_type = other RNA
tggcgcgcaggtaccggta

SEQ ID NO: 17397 - RNA, 21 nt, synthetic construct
  misc_feature 1..21: note = Synthetic
  source 1..21: mol_type = other RNA
gctggcgcgcaggtaccggta

SEQ ID NO: 17398 - RNA, 22 nt, synthetic construct
  misc_feature 1..22: note = Synthetic
  source 1..22: mol_type = other RNA
cgctggcgcgcaggtaccggta

SEQ ID NO: 17399 - RNA, 23 nt, synthetic construct
  misc_feature 1..23: note = Synthetic
  source 1..23: mol_type = other RNA
acgctggcgcgcaggtaccggta

SEQ ID NO: 17400 - RNA, 24 nt, synthetic construct
  misc_feature 1..24: note = Synthetic
  source 1..24: mol_type = other RNA
gacgctggcgcgcaggtaccggta

SEQ ID NO: 17401 - RNA, 18 nt, synthetic construct
  misc_feature 1..18: note = Synthetic
  source 1..18: mol_type = other RNA
gtaaacatctgctcaaac

SEQ ID NO: 17402 - RNA, 19 nt, synthetic construct
  misc_feature 1..19: note = Synthetic
  source 1..19: mol_type = other RNA
ggtaaacatctgctcaaac

SEQ ID NO: 17403 - RNA, 21 nt, synthetic construct
  misc_feature 1..21: note = Synthetic
  source 1..21: mol_type = other RNA
tcggtaaacatctgctcaaac

SEQ ID NO: 17404 - RNA, 22 nt, synthetic construct
  misc_feature 1..22: note = Synthetic
  source 1..22: mol_type = other RNA
atcggtaaacatctgctcaaac

SEQ ID NO: 17405 - RNA, 23 nt, synthetic construct
  misc_feature 1..23: note = Synthetic
  source 1..23: mol_type = other RNA
catcggtaaacatctgctcaaac

SEQ ID NO: 17406 - RNA, 24 nt, synthetic construct
  misc_feature 1..24: note = Synthetic
  source 1..24: mol_type = other RNA
gcatcggtaaacatctgctcaaac

SEQ ID NO: 17407 - RNA, 18 nt, synthetic construct
  misc_feature 1..18: note = Synthetic
  source 1..18: mol_type = other RNA
agcgctccgttgacgaac

SEQ ID NO: 17408 - RNA, 19 nt, synthetic construct
  misc_feature 1..19: note = Synthetic
  source 1..19: mol_type = other RNA
gagcgctccgttgacgaac

SEQ ID NO: 17409 - RNA, 21 nt, synthetic construct
  misc_feature 1..21: note = Synthetic
  source 1..21: mol_type = other RNA
gtgagcgctccgttgacgaac

SEQ ID NO: 17410 - RNA, 22 nt, synthetic construct
  misc_feature 1..22: note = Synthetic
  source 1..22: mol_type = other RNA
ggtgagcgctccgttgacgaac

SEQ ID NO: 17411 - RNA, 23 nt, synthetic construct
  misc_feature 1..23: note = Synthetic
  source 1..23: mol_type = other RNA
cggtgagcgctccgttgacgaac

SEQ ID NO: 17412 - RNA, 24 nt, synthetic construct
  misc_feature 1..24: note = Synthetic
  source 1..24: mol_type = other RNA
acggtgagcgctccgttgacgaac

SEQ ID NO: 17413 - RNA, 18 nt, synthetic construct
  misc_feature 1..18: note = Synthetic
  source 1..18: mol_type = other RNA
tcaacaccataaagtacc

SEQ ID NO: 17414 - RNA, 19 nt, synthetic construct
  misc_feature 1..19: note = Synthetic
  source 1..19: mol_type = other RNA
atcaacaccataaagtacc

SEQ ID NO: 17415 - RNA, 21 nt, synthetic construct
  misc_feature 1..21: note = Synthetic
  source 1..21: mol_type = other RNA
gaatcaacaccataaagtacc

SEQ ID NO: 17416 - RNA, 22 nt, synthetic construct
  misc_feature 1..22: note = Synthetic
  source 1..22: mol_type = other RNA
cgaatcaacaccataaagtacc

SEQ ID NO: 17417 - RNA, 23 nt, synthetic construct
  misc_feature 1..23: note = Synthetic
  source 1..23: mol_type = other RNA
ccgaatcaacaccataaagtacc

SEQ ID NO: 17418 - RNA, 24 nt, synthetic construct
  misc_feature 1..24: note = Synthetic
  source 1..24: mol_type = other RNA
cccgaatcaacaccataaagtacc

SEQ ID NO: 17419 - RNA, 18 nt, synthetic construct
  misc_feature 1..18: note = Synthetic
  source 1..18: mol_type = other RNA
ggggtaaatcccggcccc

SEQ ID NO: 17420 - RNA, 19 nt, synthetic construct
  misc_feature 1..19: note = Synthetic
  source 1..19: mol_type = other RNA
gggggtaaatcccggcccc

SEQ ID NO: 17421 - RNA, 21 nt, synthetic construct
  misc_feature 1..21: note = Synthetic
  source 1..21: mol_type = other RNA
tggggggtaaatcccggcccc

SEQ ID NO: 17422 - RNA, 22 nt, synthetic construct
  misc_feature 1..22: note = Synthetic
  source 1..22: mol_type = other RNA
gtggggggtaaatcccggcccc

SEQ ID NO: 17423 - RNA, 23 nt, synthetic construct
  misc_feature 1..23: note = Synthetic
  source 1..23: mol_type = other RNA
cgtggggggtaaatcccggcccc

SEQ ID NO: 17424 - RNA, 24 nt, synthetic construct
  misc_feature 1..24: note = Synthetic
  source 1..24: mol_type = other RNA
tcgtggggggtaaatcccggcccc

SEQ ID NO: 17425 - RNA, 18 nt, synthetic construct
  misc_feature 1..18: note = Synthetic
  source 1..18: mol_type = other RNA
gggggtaaatcccggccc

SEQ ID NO: 17426 - RNA, 19 nt, synthetic construct
  misc_feature 1..19: note = Synthetic
  source 1..19: mol_type = other RNA
ggggggtaaatcccggccc

SEQ ID NO: 17427 - RNA, 21 nt, synthetic construct
  misc_feature 1..21: note = Synthetic
  source 1..21: mol_type = other RNA
gtggggggtaaatcccggccc

SEQ ID NO: 17428 - RNA, 22 nt, synthetic construct
  misc_feature 1..22: note = Synthetic
  source 1..22: mol_type = other RNA
cgtggggggtaaatcccggccc

SEQ ID NO: 17429 - RNA, 23 nt, synthetic construct
  misc_feature 1..23: note = Synthetic
  source 1..23: mol_type = other RNA
tcgtggggggtaaatcccggccc

SEQ ID NO: 17430 - RNA, 24 nt, synthetic construct
  misc_feature 1..24: note = Synthetic
  source 1..24: mol_type = other RNA
gtcgtggggggtaaatcccggccc

SEQ ID NO: 17431 - RNA, 18 nt, synthetic construct
  misc_feature 1..18: note = Synthetic
  source 1..18: mol_type = other RNA
agtctgcgcgtgtgtccc

SEQ ID NO: 17432 - RNA, 19 nt, synthetic construct
  misc_feature 1..19: note = Synthetic
  source 1..19: mol_type = other RNA
cagtctgcgcgtgtgtccc

SEQ ID NO: 17433 - RNA, 21 nt, synthetic construct
  misc_feature 1..21: note = Synthetic
  source 1..21: mol_type = other RNA
gacagtctgcgcgtgtgtccc

SEQ ID NO: 17434 - RNA, 22 nt, synthetic construct
  misc_feature 1..22: note = Synthetic
  source 1..22: mol_type = other RNA
cgacagtctgcgcgtgtgtccc

SEQ ID NO: 17435 - RNA, 23 nt, synthetic construct
  misc_feature 1..23: note = Synthetic
  source 1..23: mol_type = other RNA
tcgacagtctgcgcgtgtgtccc

SEQ ID NO: 17436 - RNA, 24 nt, synthetic construct
  misc_feature 1..24: note = Synthetic
  source 1..24: mol_type = other RNA
gtcgacagtctgcgcgtgtgtccc

SEQ ID NO: 17437 - RNA, 18 nt, synthetic construct
  misc_feature 1..18: note = Synthetic
  source 1..18: mol_type = other RNA
tgttcccgcatgaccgcc

SEQ ID NO: 17438 - RNA, 19 nt, synthetic construct
  misc_feature 1..19: note = Synthetic
  source 1..19: mol_type = other RNA
gtgttcccgcatgaccgcc

SEQ ID NO: 17439 - RNA, 21 nt, synthetic construct
  misc_feature 1..21: note = Synthetic
  source 1..21: mol_type = other RNA
gcgtgttcccgcatgaccgcc

SEQ ID NO: 17440 - RNA, 22 nt, synthetic construct
  misc_feature 1..22: note = Synthetic
  source 1..22: mol_type = other RNA
cgcgtgttcccgcatgaccgcc

SEQ ID NO: 17441 - RNA, 23 nt, synthetic construct
  misc_feature 1..23: note = Synthetic
  source 1..23: mol_type = other RNA
acgcgtgttcccgcatgaccgcc

SEQ ID NO: 17442 - RNA, 24 nt, synthetic construct
  misc_feature 1..24: note = Synthetic
  source 1..24: mol_type = other RNA
tacgcgtgttcccgcatgaccgcc

SEQ ID NO: 17443 - RNA, 18 nt, synthetic construct
  misc_feature 1..18: note = Synthetic
  source 1..18: mol_type = other RNA
ggggggtaaatcccggcc

SEQ ID NO: 17444 - RNA, 19 nt, synthetic construct
  misc_feature 1..19: note = Synthetic
  source 1..19: mol_type = other RNA
tggggggtaaatcccggcc

SEQ ID NO: 17445 - RNA, 21 nt, synthetic construct
  misc_feature 1..21: note = Synthetic
  source 1..21: mol_type = other RNA
cgtggggggtaaatcccggcc

SEQ ID NO: 17446 - RNA, 22 nt, synthetic construct
  misc_feature 1..22: note = Synthetic
  source 1..22: mol_type = other RNA
tcgtggggggtaaatcccggcc

SEQ ID NO: 17447 - RNA, 23 nt, synthetic construct
  misc_feature 1..23: note = Synthetic
  source 1..23: mol_type = other RNA
gtcgtggggggtaaatcccggcc

SEQ ID NO: 17448 - RNA, 24 nt, synthetic construct
  misc_feature 1..24: note = Synthetic
  source 1..24: mol_type = other RNA
agtcgtggggggtaaatcccggcc

SEQ ID NO: 17449 - RNA, 18 nt, synthetic construct
  misc_feature 1..18: note = Synthetic
  source 1..18: mol_type = other RNA
ggcctcgattggcactcc

SEQ ID NO: 17450 - RNA, 19 nt, synthetic construct
  misc_feature 1..19: note = Synthetic
  source 1..19: mol_type = other RNA
gggcctcgattggcactcc

SEQ ID NO: 17451 - RNA, 21 nt, synthetic construct
  misc_feature 1..21: note = Synthetic
  source 1..21: mol_type = other RNA
gcgggcctcgattggcactcc

SEQ ID NO: 17452 - RNA, 22 nt, synthetic construct
  misc_feature 1..22: note = Synthetic
  source 1..22: mol_type = other RNA
ggcgggcctcgattggcactcc

SEQ ID NO: 17453 - RNA, 23 nt, synthetic construct
  misc_feature 1..23: note = Synthetic
  source 1..23: mol_type = other RNA
cggcgggcctcgattggcactcc

SEQ ID NO: 17454 - RNA, 24 nt, synthetic construct
  misc_feature 1..24: note = Synthetic
  source 1..24: mol_type = other RNA
ccggcgggcctcgattggcactcc

SEQ ID NO: 17455 - RNA, 18 nt, synthetic construct
  misc_feature 1..18: note = Synthetic
  source 1..18: mol_type = other RNA
tcgggggcgtcgtcgtcc

SEQ ID NO: 17456 - RNA, 19 nt, synthetic construct
  misc_feature 1..19: note = Synthetic
  source 1..19: mol_type = other RNA
ttcgggggcgtcgtcgtcc

SEQ ID NO: 17457 - RNA, 21 nt, synthetic construct
  misc_feature 1..21: note = Synthetic
  source 1..21: mol_type = other RNA
tcttcgggggcgtcgtcgtcc

SEQ ID NO: 17458 - RNA, 22 nt, synthetic construct
  misc_feature 1..22: note = Synthetic
  source 1..22: mol_type = other RNA
ctcttcgggggcgtcgtcgtcc

SEQ ID NO: 17459 - RNA, 23 nt, synthetic construct
  misc_feature 1..23: note = Synthetic
  source 1..23: mol_type = other RNA
cctcttcgggggcgtcgtcgtcc

SEQ ID NO: 17460 - RNA, 24 nt, synthetic construct
  misc_feature 1..24: note = Synthetic
  source 1..24: mol_type = other RNA
gcctcttcgggggcgtcgtcgtcc

SEQ ID NO: 17461 - RNA, 18 nt, synthetic construct
  misc_feature 1..18: note = Synthetic
  source 1..18: mol_type = other RNA
accgtactcgtcaattcc

SEQ ID NO: 17462 - RNA, 19 nt, synthetic construct
  misc_feature 1..19: note = Synthetic
  source 1..19: mol_type = other RNA
caccgtactcgtcaattcc

SEQ ID NO: 17463 - RNA, 21 nt, synthetic construct
  misc_feature 1..21: note = Synthetic
  source 1..21: mol_type = other RNA
cccaccgtactcgtcaattcc

SEQ ID NO: 17464 - RNA, 22 nt, synthetic construct
  misc_feature 1..22: note = Synthetic
  source 1..22: mol_type = other RNA
acccaccgtactcgtcaattcc

SEQ ID NO: 17465 - RNA, 23 nt, synthetic construct
  misc_feature 1..23: note = Synthetic
  source 1..23: mol_type = other RNA
tacccaccgtactcgtcaattcc

SEQ ID NO: 17466 - RNA, 24 nt, synthetic construct
  misc_feature 1..24: note = Synthetic
  source 1..24: mol_type = other RNA
ctacccaccgtactcgtcaattcc

SEQ ID NO: 17467 - RNA, 18 nt, synthetic construct
  misc_feature 1..18: note = Synthetic
  source 1..18: mol_type = other RNA
gccgcgctgcgcaccagc

SEQ ID NO: 17468 - RNA, 19 nt, synthetic construct
  misc_feature 1..19: note = Synthetic
  source 1..19: mol_type = other RNA
agccgcgctgcgcaccagc

SEQ ID NO: 17469 - RNA, 21 nt, synthetic construct
  misc_feature 1..21: note = Synthetic
  source 1..21: mol_type = other RNA
gtagccgcgctgcgcaccagc

SEQ ID NO: 17470 - RNA, 22 nt, synthetic construct
  misc_feature 1..22: note = Synthetic
  source 1..22: mol_type = other RNA
cgtagccgcgctgcgcaccagc

SEQ ID NO: 17471 - RNA, 23 nt, synthetic construct
  misc_feature 1..23: note = Synthetic
  source 1..23: mol_type = other RNA
ccgtagccgcgctgcgcaccagc

SEQ ID NO: 17472 - RNA, 24 nt, synthetic construct
  misc_feature 1..24: note = Synthetic
  source 1..24: mol_type = other RNA
tccgtagccgcgctgcgcaccagc

SEQ ID NO: 17473 - RNA, 18 nt, synthetic construct
  misc_feature 1..18: note = Synthetic
  source 1..18: mol_type = other RNA
tctgcgcgtgtgtcccgc

SEQ ID NO: 17474 - RNA, 19 nt, synthetic construct
  misc_feature 1..19: note = Synthetic
  source 1..19: mol_type = other RNA
gtctgcgcgtgtgtcccgc

SEQ ID NO: 17475 - RNA, 21 nt, synthetic construct
  misc_feature 1..21: note = Synthetic
  source 1..21: mol_type = other RNA
cagtctgcgcgtgtgtcccgc

SEQ ID NO: 17476 - RNA, 22 nt, synthetic construct
  misc_feature 1..22: note = Synthetic
  source 1..22: mol_type = other RNA
acagtctgcgcgtgtgtcccgc

SEQ ID NO: 17477 - RNA, 23 nt, synthetic construct
  misc_feature 1..23: note = Synthetic
  source 1..23: mol_type = other RNA
gacagtctgcgcgtgtgtcccgc

SEQ ID NO: 17478 - RNA, 24 nt, synthetic construct
  misc_feature 1..24: note = Synthetic
  source 1..24: mol_type = other RNA
cgacagtctgcgcgtgtgtcccgc

SEQ ID NO: 17479 - RNA, 18 nt, synthetic construct
  misc_feature 1..18: note = Synthetic
  source 1..18: mol_type = other RNA
cggggagaaaggacaggc

SEQ ID NO: 17480 - RNA, 19 nt, synthetic construct
  misc_feature 1..19: note = Synthetic
  source 1..19: mol_type = other RNA
gcggggagaaaggacaggc

SEQ ID NO: 17481 - RNA, 21 nt, synthetic construct
  misc_feature 1..21: note = Synthetic
  source 1..21: mol_type = other RNA
ccgcggggagaaaggacaggc

SEQ ID NO: 17482 - RNA, 22 nt, synthetic construct
  misc_feature 1..22: note = Synthetic
  source 1..22: mol_type = other RNA
cccgcggggagaaaggacaggc

SEQ ID NO: 17483 - RNA, 23 nt, synthetic construct
  misc_feature 1..23: note = Synthetic
  source 1..23: mol_type = other RNA
tcccgcggggagaaaggacaggc

SEQ ID NO: 17484 - RNA, 24 nt, synthetic construct
  misc_feature 1..24: note = Synthetic
  source 1..24: mol_type = other RNA
gtcccgcggggagaaaggacaggc

SEQ ID NO: 17485 - RNA, 18 nt, synthetic construct
  misc_feature 1..18: note = Synthetic
  source 1..18: mol_type = other RNA
cataaagtacccagaggc

SEQ ID NO: 17486 - RNA, 19 nt, synthetic construct
  misc_feature 1..19: note = Synthetic
  source 1..19: mol_type = other RNA
ccataaagtacccagaggc

SEQ ID NO: 17487 - RNA, 21 nt, synthetic construct
  misc_feature 1..21: note = Synthetic
  source 1..21: mol_type = other RNA
caccataaagtacccagaggc

SEQ ID NO: 17488 - RNA, 22 nt, synthetic construct
  misc_feature 1..22: note = Synthetic
  source 1..22: mol_type = other RNA
acaccataaagtacccagaggc

SEQ ID NO: 17489 - RNA, 23 nt, synthetic construct
  misc_feature 1..23: note = Synthetic
  source 1..23: mol_type = other RNA
aacaccataaagtacccagaggc

SEQ ID NO: 17490 - RNA, 24 nt, synthetic construct
  misc_feature 1..24: note = Synthetic
  source 1..24: mol_type = other RNA
caacaccataaagtacccagaggc

SEQ ID NO: 17491 - RNA, 18 nt, synthetic construct
  misc_feature 1..18: note = Synthetic
  source 1..18: mol_type = other RNA
ttgacgaacatgaagggc

SEQ ID NO: 17492 - RNA, 19 nt, synthetic construct
  misc_feature 1..19: note = Synthetic
  source 1..19: mol_type = other RNA
gttgacgaacatgaagggc

SEQ ID NO: 17493 - RNA, 21 nt, synthetic construct
  misc_feature 1..21: note = Synthetic
  source 1..21: mol_type = other RNA
ccgttgacgaacatgaagggc

SEQ ID NO: 17494 - RNA, 22 nt, synthetic construct
  misc_feature 1..22: note = Synthetic
  source 1..22: mol_type = other RNA
tccgttgacgaacatgaagggc

SEQ ID NO: 17495 - RNA, 23 nt, synthetic construct
  misc_feature 1..23: note = Synthetic
  source 1..23: mol_type = other RNA
ctccgttgacgaacatgaagggc

SEQ ID NO: 17496 - RNA, 24 nt, synthetic construct
  misc_feature 1..24: note = Synthetic
  source 1..24: mol_type = other RNA
gctccgttgacgaacatgaagggc

SEQ ID NO: 17497 - RNA, 18 nt, synthetic construct
  misc_feature 1..18: note = Synthetic
  source 1..18: mol_type = other RNA
ctcgaagtcggccatatc

SEQ ID NO: 17498 - RNA, 19 nt, synthetic construct
  misc_feature 1..19: note = Synthetic
  source 1..19: mol_type = other RNA
actcgaagtcggccatatc

SEQ ID NO: 17499 - RNA, 21 nt, synthetic construct
  misc_feature 1..21: note = Synthetic
  source 1..21: mol_type = other RNA
aaactcgaagtcggccatatc

SEQ ID NO: 17500 - RNA, 22 nt, synthetic construct
  misc_feature 1..22: note = Synthetic
  source 1..22: mol_type = other RNA
caaactcgaagtcggccatatc

SEQ ID NO: 17501 - RNA, 23 nt, synthetic construct
  misc_feature 1..23: note = Synthetic
  source 1..23: mol_type = other RNA
tcaaactcgaagtcggccatatc

SEQ ID NO: 17502 - RNA, 24 nt, synthetic construct
  misc_feature 1..24: note = Synthetic
  source 1..24: mol_type = other RNA
ctcaaactcgaagtcggccatatc

SEQ ID NO: 17503 - RNA, 18 nt, synthetic construct
  misc_feature 1..18: note = Synthetic
  source 1..18: mol_type = other RNA
gccgtagggggcggagtc

SEQ ID NO: 17504 - RNA, 19 nt, synthetic construct
  misc_feature 1..19: note = Synthetic
  source 1..19: mol_type = other RNA
cgccgtagggggcggagtc

SEQ ID NO: 17505 - RNA, 21 nt, synthetic construct
  misc_feature 1..21: note = Synthetic
  source 1..21: mol_type = other RNA
agcgccgtagggggcggagtc

SEQ ID NO: 17506 - RNA, 22 nt, synthetic construct
  misc_feature 1..22: note = Synthetic
  source 1..22: mol_type = other RNA
gagcgccgtagggggcggagtc

SEQ ID NO: 17507 - RNA, 23 nt, synthetic construct
  misc_feature 1..23: note = Synthetic
  source 1..23: mol_type = other RNA
agagcgccgtagggggcggagtc

SEQ ID NO: 17508 - RNA, 24 nt, synthetic construct
  misc_feature 1..24: note = Synthetic
  source 1..24: mol_type = other RNA
cagagcgccgtagggggcggagtc

SEQ ID NO: 17509 - RNA, 18 nt, synthetic construct
  misc_feature 1..18: note = Synthetic
  source 1..18: mol_type = other RNA
ttcgggggcgtcgtcgtc

SEQ ID NO: 17510 - RNA, 19 nt, synthetic construct
  misc_feature 1..19: note = Synthetic
  source 1..19: mol_type = other RNA
cttcgggggcgtcgtcgtc

SEQ ID NO: 17511 - RNA, 21 nt, synthetic construct
  misc_feature 1..21: note = Synthetic
  source 1..21: mol_type = other RNA
ctcttcgggggcgtcgtcgtc

SEQ ID NO: 17512 - RNA, 22 nt, synthetic construct
  misc_feature 1..22: note = Synthetic
  source 1..22: mol_type = other RNA
cctcttcgggggcgtcgtcgtc

SEQ ID NO: 17513 - RNA, 23 nt, synthetic construct
  misc_feature 1..23: note = Synthetic
  source 1..23: mol_type = other RNA
gcctcttcgggggcgtcgtcgtc

SEQ ID NO: 17514 - RNA, 24 nt, synthetic construct
  misc_feature 1..24: note = Synthetic
  source 1..24: mol_type = other RNA
cgcctcttcgggggcgtcgtcgtc

SEQ ID NO: 17515 - RNA, 18 nt, synthetic construct
  misc_feature 1..18: note = Synthetic
  source 1..18: mol_type = other RNA
gcctcggagggcgaggtc

SEQ ID NO: 17516 - RNA, 19 nt, synthetic construct
  misc_feature 1..19: note = Synthetic
  source 1..19: mol_type = other RNA
cgcctcggagggcgaggtc

SEQ ID NO: 17517 - RNA, 21 nt, synthetic construct
  misc_feature 1..21: note = Synthetic
  source 1..21: mol_type = other RNA
accgcctcggagggcgaggtc

SEQ ID NO: 17518 - RNA, 22 nt, synthetic construct
  misc_feature 1..22: note = Synthetic
  source 1..22: mol_type = other RNA
gaccgcctcggagggcgaggtc

SEQ ID NO: 17519 - RNA, 23 nt, synthetic construct
  misc_feature 1..23: note = Synthetic
  source 1..23: mol_type = other RNA
tgaccgcctcggagggcgaggtc

SEQ ID NO: 17520 - RNA, 24 nt, synthetic construct
  misc_feature 1..24: note = Synthetic
  source 1..24: mol_type = other RNA
atgaccgcctcggagggcgaggtc

SEQ ID NO: 17521 - RNA, 18 nt, synthetic construct
  misc_feature 1..18: note = Synthetic
  source 1..18: mol_type = other RNA
cccaggctgacatcggtc

SEQ ID NO: 17522 - RNA, 19 nt, synthetic construct
  misc_feature 1..19: note = Synthetic
  source 1..19: mol_type = other RNA
ccccaggctgacatcggtc

SEQ ID NO: 17523 - RNA, 21 nt, synthetic construct
  misc_feature 1..21: note = Synthetic
  source 1..21: mol_type = other RNA
tcccccaggctgacatcggtc

SEQ ID NO: 17524 - RNA, 22 nt, synthetic construct
  misc_feature 1..22: note = Synthetic
  source 1..22: mol_type = other RNA
gtcccccaggctgacatcggtc

SEQ ID NO: 17525 - RNA, 23 nt, synthetic construct
  misc_feature 1..23: note = Synthetic
  source 1..23: mol_type = other RNA
cgtcccccaggctgacatcggtc

SEQ ID NO: 17526 - RNA, 24 nt, synthetic construct
  misc_feature 1..24: note = Synthetic
  source 1..24: mol_type = other RNA
tcgtcccccaggctgacatcggtc

SEQ ID NO: 17527 - RNA, 18 nt, synthetic construct
  misc_feature 1..18: note = Synthetic
  source 1..18: mol_type = other RNA
cgccagccccgcctcttc

SEQ ID NO: 17528 - RNA, 19 nt, synthetic construct
  misc_feature 1..19: note = Synthetic
  source 1..19: mol_type = other RNA
ccgccagccccgcctcttc

SEQ ID NO: 17529 - RNA, 21 nt, synthetic construct
  misc_feature 1..21: note = Synthetic
  source 1..21: mol_type = other RNA
agccgccagccccgcctcttc

SEQ ID NO: 17530 - RNA, 22 nt, synthetic construct
  misc_feature 1..22: note = Synthetic
  source 1..22: mol_type = other RNA
gagccgccagccccgcctcttc

SEQ ID NO: 17531 - RNA, 23 nt, synthetic construct
  misc_feature 1..23: note = Synthetic
  source 1..23: mol_type = other RNA
ggagccgccagccccgcctcttc

SEQ ID NO: 17532 - RNA, 24 nt, synthetic construct
  misc_feature 1..24: note = Synthetic
  source 1..24: mol_type = other RNA
cggagccgccagccccgcctcttc

SEQ ID NO: 17533 - RNA, 18 nt, synthetic construct
  misc_feature 1..18: note = Synthetic
  source 1..18: mol_type = other RNA
gagggcgaggtcgtgaag

SEQ ID NO: 17534 - RNA, 19 nt, synthetic construct
  misc_feature 1..19: note = Synthetic
  source 1..19: mol_type = other RNA
ggagggcgaggtcgtgaag

SEQ ID NO: 17535 - RNA, 21 nt, synthetic construct
  misc_feature 1..21: note = Synthetic
  source 1..21: mol_type = other RNA
tcggagggcgaggtcgtgaag

SEQ ID NO: 17536 - RNA, 22 nt, synthetic construct
  misc_feature 1..22: note = Synthetic
  source 1..22: mol_type = other RNA
ctcggagggcgaggtcgtgaag

SEQ ID NO: 17537 - RNA, 23 nt, synthetic construct
  misc_feature 1..23: note = Synthetic
  source 1..23: mol_type = other RNA
cctcggagggcgaggtcgtgaag

SEQ ID NO: 17538 - RNA, 24 nt, synthetic construct
  misc_feature 1..24: note = Synthetic
  source 1..24: mol_type = other RNA
gcctcggagggcgaggtcgtgaag

SEQ ID NO: 17539 - RNA, 18 nt, synthetic construct
  misc_feature 1..18: note = Synthetic
  source 1..18: mol_type = other RNA
acgtcctcgccgtctaag

SEQ ID NO: 17540 - RNA, 19 nt, synthetic construct
  misc_feature 1..19: note = Synthetic
  source 1..19: mol_type = other RNA
cacgtcctcgccgtctaag

SEQ ID NO: 17541 - RNA, 21 nt, synthetic construct
  misc_feature 1..21: note = Synthetic
  source 1..21: mol_type = other RNA
gccacgtcctcgccgtctaag

SEQ ID NO: 17542 - RNA, 22 nt, synthetic construct
  misc_feature 1..22: note = Synthetic
  source 1..22: mol_type = other RNA
cgccacgtcctcgccgtctaag

SEQ ID NO: 17543 - RNA, 23 nt, synthetic construct
  misc_feature 1..23: note = Synthetic
  source 1..23: mol_type = other RNA
tcgccacgtcctcgccgtctaag

SEQ ID NO: 17544 - RNA, 24 nt, synthetic construct
  misc_feature 1..24: note = Synthetic
  source 1..24: mol_type = other RNA
atcgccacgtcctcgccgtctaag

SEQ ID NO: 17545 - RNA, 18 nt, synthetic construct
  misc_feature 1..18: note = Synthetic
  source 1..18: mol_type = other RNA
agccgcgctgcgcaccag

SEQ ID NO: 17546 - RNA, 19 nt, synthetic construct
  misc_feature 1..19: note = Synthetic
  source 1..19: mol_type = other RNA
tagccgcgctgcgcaccag

SEQ ID NO: 17547 - RNA, 21 nt, synthetic construct
  misc_feature 1..21: note = Synthetic
  source 1..21: mol_type = other RNA
cgtagccgcgctgcgcaccag

SEQ ID NO: 17548 - RNA, 22 nt, synthetic construct
  misc_feature 1..22: note = Synthetic
  source 1..22: mol_type = other RNA
ccgtagccgcgctgcgcaccag

SEQ ID NO: 17549 - RNA, 23 nt, synthetic construct
  misc_feature 1..23: note = Synthetic
  source 1..23: mol_type = other RNA
tccgtagccgcgctgcgcaccag

SEQ ID NO: 17550 - RNA, 24 nt, synthetic construct
  misc_feature 1..24: note = Synthetic
  source 1..24: mol_type = other RNA
ctccgtagccgcgctgcgcaccag

SEQ ID NO: 17551 - RNA, 18 nt, synthetic construct
  misc_feature 1..18: note = Synthetic
  source 1..18: mol_type = other RNA
aaacaaaacacgcgccag

SEQ ID NO: 17552 - RNA, 19 nt, synthetic construct
  misc_feature 1..19: note = Synthetic
  source 1..19: mol_type = other RNA
aaaacaaaacacgcgccag

SEQ ID NO: 17553 - RNA, 21 nt, synthetic construct
  misc_feature 1..21: note = Synthetic
  source 1..21: mol_type = other RNA
caaaaacaaaacacgcgccag

SEQ ID NO: 17554 - RNA, 22 nt, synthetic construct
  misc_feature 1..22: note = Synthetic
  source 1..22: mol_type = other RNA
gcaaaaacaaaacacgcgccag

SEQ ID NO: 17555 - RNA, 23 nt, synthetic construct
  misc_feature 1..23: note = Synthetic
  source 1..23: mol_type = other RNA
tgcaaaaacaaaacacgcgccag

SEQ ID NO: 17556 - RNA, 24 nt, synthetic construct
  misc_feature 1..24: note = Synthetic
  source 1..24: mol_type = other RNA
atgcaaaaacaaaacacgcgccag

SEQ ID NO: 17557 - RNA, 18 nt, synthetic construct
  misc_feature 1..18: note = Synthetic
  source 1..18: mol_type = other RNA
taccggtacagggccgag

SEQ ID NO: 17558 - RNA, 19 nt, synthetic construct
  misc_feature 1..19: note = Synthetic
  source 1..19: mol_type = other RNA
gtaccggtacagggccgag

SEQ ID NO: 17559 - RNA, 21 nt, synthetic construct
  misc_feature 1..21: note = Synthetic
  source 1..21: mol_type = other RNA
aggtaccggtacagggccgag

SEQ ID NO: 17560 - RNA, 22 nt, synthetic construct
  misc_feature 1..22: note = Synthetic
  source 1..22: mol_type = other RNA
caggtaccggtacagggccgag

SEQ ID NO: 17561 - RNA, 23 nt, synthetic construct
  misc_feature 1..23: note = Synthetic
  source 1..23: mol_type = other RNA
gcaggtaccggtacagggccgag

SEQ ID NO: 17562 - RNA, 24 nt, synthetic construct
  misc_feature 1..24: note = Synthetic
  source 1..24: mol_type = other RNA
cgcaggtaccggtacagggccgag

SEQ ID NO: 17563 - RNA, 18 nt, synthetic construct
  misc_feature 1..18: note = Synthetic
  source 1..18: mol_type = other RNA
attggcactccccggacg

SEQ ID NO: 17564 - RNA, 19 nt, synthetic construct
  misc_feature 1..19: note = Synthetic
  source 1..19: mol_type = other RNA
gattggcactccccggacg

SEQ ID NO: 17565 - RNA, 21 nt, synthetic construct
  misc_feature 1..21: note = Synthetic
  source 1..21: mol_type = other RNA
tcgattggcactccccggacg

SEQ ID NO: 17566 - RNA, 22 nt, synthetic construct
  misc_feature 1..22: note = Synthetic
  source 1..22: mol_type = other RNA
ctcgattggcactccccggacg

SEQ ID NO: 17567 - RNA, 23 nt, synthetic construct
  misc_feature 1..23: note = Synthetic
  source 1..23: mol_type = other RNA
cctcgattggcactccccggacg

SEQ ID NO: 17568 - RNA, 24 nt, synthetic construct
  misc_feature 1..24: note = Synthetic
  source 1..24: mol_type = other RNA
gcctcgattggcactccccggacg

SEQ ID NO: 17569 - RNA, 18 nt, synthetic construct
  misc_feature 1..18: note = Synthetic
  source 1..18: mol_type = other RNA
gtctgcgcgtgtgtcccg

SEQ ID NO: 17570 - RNA, 19 nt, synthetic construct
  misc_feature 1..19: note = Synthetic
  source 1..19: mol_type = other RNA
agtctgcgcgtgtgtcccg

SEQ ID NO: 17571 - RNA, 21 nt, synthetic construct
  misc_feature 1..21: note = Synthetic
  source 1..21: mol_type = other RNA
acagtctgcgcgtgtgtcccg

SEQ ID NO: 17572 - RNA, 22 nt, synthetic construct
  misc_feature 1..22: note = Synthetic
  source 1..22: mol_type = other RNA
gacagtctgcgcgtgtgtcccg

SEQ ID NO: 17573 - RNA, 23 nt, synthetic construct
  misc_feature 1..23: note = Synthetic
  source 1..23: mol_type = other RNA
cgacagtctgcgcgtgtgtcccg

SEQ ID NO: 17574 - RNA, 24 nt, synthetic construct
  misc_feature 1..24: note = Synthetic
  source 1..24: mol_type = other RNA
tcgacagtctgcgcgtgtgtcccg

SEQ ID NO: 17575 - RNA, 18 nt, synthetic construct
  misc_feature 1..18: note = Synthetic
  source 1..18: mol_type = other RNA
gtttagctcccgcagccg

SEQ ID NO: 17576 - RNA, 19 nt, synthetic construct
  misc_feature 1..19: note = Synthetic
  source 1..19: mol_type = other RNA
ggtttagctcccgcagccg

SEQ ID NO: 17577 - RNA, 21 nt, synthetic construct
  misc_feature 1..21: note = Synthetic
  source 1..21: mol_type = other RNA
gtggtttagctcccgcagccg

SEQ ID NO: 17578 - RNA, 22 nt, synthetic construct
  misc_feature 1..22: note = Synthetic
  source 1..22: mol_type = other RNA
tgtggtttagctcccgcagccg

SEQ ID NO: 17579 - RNA, 23 nt, synthetic construct
  misc_feature 1..23: note = Synthetic
  source 1..23: mol_type = other RNA
atgtggtttagctcccgcagccg

SEQ ID NO: 17580 - RNA, 24 nt, synthetic construct
  misc_feature 1..24: note = Synthetic
  source 1..24: mol_type = other RNA
aatgtggtttagctcccgcagccg

SEQ ID NO: 17581 - RNA, 18 nt, synthetic construct
  misc_feature 1..18: note = Synthetic
  source 1..18: mol_type = other RNA
gccatatccagagcgccg

SEQ ID NO: 17582 - RNA, 19 nt, synthetic construct
  misc_feature 1..19: note = Synthetic
  source 1..19: mol_type = other RNA
ggccatatccagagcgccg

SEQ ID NO: 17583 - RNA, 21 nt, synthetic construct
  misc_feature 1..21: note = Synthetic
  source 1..21: mol_type = other RNA
tcggccatatccagagcgccg

SEQ ID NO: 17584 - RNA, 22 nt, synthetic construct
  misc_feature 1..22: note = Synthetic
  source 1..22: mol_type = other RNA
gtcggccatatccagagcgccg

SEQ ID NO: 17585 - RNA, 23 nt, synthetic construct
  misc_feature 1..23: note = Synthetic
  source 1..23: mol_type = other RNA
agtcggccatatccagagcgccg

SEQ ID NO: 17586 - RNA, 24 nt, synthetic construct
  misc_feature 1..24: note = Synthetic
  source 1..24: mol_type = other RNA
aagtcggccatatccagagcgccg

SEQ ID NO: 17587 - RNA, 18 nt, synthetic construct
  misc_feature 1..18: note = Synthetic
  source 1..18: mol_type = other RNA
ctgcgcgtgtgtcccgcg

SEQ ID NO: 17588 - RNA, 19 nt, synthetic construct
  misc_feature 1..19: note = Synthetic
  source 1..19: mol_type = other RNA
tctgcgcgtgtgtcccgcg

SEQ ID NO: 17589 - RNA, 21 nt, synthetic construct
  misc_feature 1..21: note = Synthetic
  source 1..21: mol_type = other RNA
agtctgcgcgtgtgtcccgcg

SEQ ID NO: 17590 - RNA, 22 nt, synthetic construct
  misc_feature 1..22: note = Synthetic
  source 1..22: mol_type = other RNA
cagtctgcgcgtgtgtcccgcg

SEQ ID NO: 17591 - RNA, 23 nt, synthetic construct
  misc_feature 1..23: note = Synthetic
  source 1..23: mol_type = other RNA
acagtctgcgcgtgtgtcccgcg

SEQ ID NO: 17592 - RNA, 24 nt, synthetic construct
  misc_feature 1..24: note = Synthetic
  source 1..24: mol_type = other RNA
gacagtctgcgcgtgtgtcccgcg

SEQ ID NO: 17593 - RNA, 18 nt, synthetic construct
  misc_feature 1..18: note = Synthetic
  source 1..18: mol_type = other RNA
ggggagaaaggacaggcg

SEQ ID NO: 17594 - RNA, 19 nt, synthetic construct
  misc_feature 1..19: note = Synthetic
  source 1..19: mol_type = other RNA
cggggagaaaggacaggcg

SEQ ID NO: 17595 - RNA, 21 nt, synthetic construct
  misc_feature 1..21: note = Synthetic
  source 1..21: mol_type = other RNA
cgcggggagaaaggacaggcg

SEQ ID NO: 17596 - RNA, 22 nt, synthetic construct
  misc_feature 1..22: note = Synthetic
  source 1..22: mol_type = other RNA
ccgcggggagaaaggacaggcg

SEQ ID NO: 17597 - RNA, 23 nt, synthetic construct
  misc_feature 1..23: note = Synthetic
  source 1..23: mol_type = other RNA
cccgcggggagaaaggacaggcg

SEQ ID NO: 17598 - RNA, 24 nt, synthetic construct
  misc_feature 1..24: note = Synthetic
  source 1..24: mol_type = other RNA
tcccgcggggagaaaggacaggcg

SEQ ID NO: 17599 - RNA, 18 nt, synthetic construct
  misc_feature 1..18: note = Synthetic
  source 1..18: mol_type = other RNA
tcccgcatgaccgcctcg

SEQ ID NO: 17600 - RNA, 19 nt, synthetic construct
  misc_feature 1..19: note = Synthetic
  source 1..19: mol_type = other RNA
ttcccgcatgaccgcctcg

SEQ ID NO: 17601 - RNA, 21 nt, synthetic construct
  misc_feature 1..21: note = Synthetic
  source 1..21: mol_type = other RNA
tgttcccgcatgaccgcctcg

SEQ ID NO: 17602 - RNA, 22 nt, synthetic construct
  misc_feature 1..22: note = Synthetic
  source 1..22: mol_type = other RNA
gtgttcccgcatgaccgcctcg

SEQ ID NO: 17603 - RNA, 23 nt, synthetic construct
  misc_feature 1..23: note = Synthetic
  source 1..23: mol_type = other RNA
cgtgttcccgcatgaccgcctcg

SEQ ID NO: 17604 - RNA, 24 nt, synthetic construct
  misc_feature 1..24: note = Synthetic
  source 1..24: mol_type = other RNA
gcgtgttcccgcatgaccgcctcg

SEQ ID NO: 17605 - RNA, 18 nt, synthetic construct
  misc_feature 1..18: note = Synthetic
  source 1..18: mol_type = other RNA
ccgtagggggcggagtcg

SEQ ID NO: 17606 - RNA, 19 nt, synthetic construct
  misc_feature 1..19: note = Synthetic
  source 1..19: mol_type = other RNA
gccgtagggggcggagtcg

SEQ ID NO: 17607 - RNA, 21 nt, synthetic construct
  misc_feature 1..21: note = Synthetic
  source 1..21: mol_type = other RNA
gcgccgtagggggcggagtcg

SEQ ID NO: 17608 - RNA, 22 nt, synthetic construct
  misc_feature 1..22: note = Synthetic
  source 1..22: mol_type = other RNA
agcgccgtagggggcggagtcg

SEQ ID NO: 17609 - RNA, 23 nt, synthetic construct
  misc_feature 1..23: note = Synthetic
  source 1..23: mol_type = other RNA
gagcgccgtagggggcggagtcg

SEQ ID NO: 17610 - RNA, 24 nt, synthetic construct
  misc_feature 1..24: note = Synthetic
  source 1..24: mol_type = other RNA
agagcgccgtagggggcggagtcg

SEQ ID NO: 17611 - RNA, 18 nt, synthetic construct
  misc_feature 1..18: note = Synthetic
  source 1..18: mol_type = other RNA
ccaggctgacatcggtcg

SEQ ID NO: 17612 - RNA, 19 nt, synthetic construct
  misc_feature 1..19: note = Synthetic
  source 1..19: mol_type = other RNA
cccaggctgacatcggtcg

SEQ ID NO: 17613 - RNA, 21 nt, synthetic construct
  misc_feature 1..21: note = Synthetic
  source 1..21: mol_type = other RNA
cccccaggctgacatcggtcg

SEQ ID NO: 17614 - RNA, 22 nt, synthetic construct
  misc_feature 1..22: note = Synthetic
  source 1..22: mol_type = other RNA
tcccccaggctgacatcggtcg

SEQ ID NO: 17615 - RNA, 23 nt, synthetic construct
  misc_feature 1..23: note = Synthetic
  source 1..23: mol_type = other RNA
gtcccccaggctgacatcggtcg

SEQ ID NO: 17616 - RNA, 24 nt, synthetic construct
  misc_feature 1..24: note = Synthetic
  source 1..24: mol_type = other RNA
cgtcccccaggctgacatcggtcg

SEQ ID NO: 17617 - RNA, 18 nt, synthetic construct
  misc_feature 1..18: note = Synthetic
  source 1..18: mol_type = other RNA
cagaggcagtcaaacagg

SEQ ID NO: 17618 - RNA, 19 nt, synthetic construct
  misc_feature 1..19: note = Synthetic
  source 1..19: mol_type = other RNA
acagaggcagtcaaacagg

SEQ ID NO: 17619 - RNA, 21 nt, synthetic construct
  misc_feature 1..21: note = Synthetic
  source 1..21: mol_type = other RNA
caacagaggcagtcaaacagg

SEQ ID NO: 17620 - RNA, 22 nt, synthetic construct
  misc_feature 1..22: note = Synthetic
  source 1..22: mol_type = other RNA
gcaacagaggcagtcaaacagg

SEQ ID NO: 17621 - RNA, 23 nt, synthetic construct
  misc_feature 1..23: note = Synthetic
  source 1..23: mol_type = other RNA
cgcaacagaggcagtcaaacagg

SEQ ID NO: 17622 - RNA, 24 nt, synthetic construct
  misc_feature 1..24: note = Synthetic
  source 1..24: mol_type = other RNA
tcgcaacagaggcagtcaaacagg

SEQ ID NO: 17623 - RNA, 18 nt, synthetic construct
  misc_feature 1..18: note = Synthetic
  source 1..18: mol_type = other RNA
gcctggttgccatgcagg

SEQ ID NO: 17624 - RNA, 19 nt, synthetic construct
  misc_feature 1..19: note = Synthetic
  source 1..19: mol_type = other RNA
ggcctggttgccatgcagg

SEQ ID NO: 17625 - RNA, 21 nt, synthetic construct
  misc_feature 1..21: note = Synthetic
  source 1..21: mol_type = other RNA
cgggcctggttgccatgcagg

SEQ ID NO: 17626 - RNA, 22 nt, synthetic construct
  misc_feature 1..22: note = Synthetic
  source 1..22: mol_type = other RNA
gcgggcctggttgccatgcagg

SEQ ID NO: 17627 - RNA, 23 nt, synthetic construct
  misc_feature 1..23: note = Synthetic
  source 1..23: mol_type = other RNA
cgcgggcctggttgccatgcagg

SEQ ID NO: 17628 - RNA, 24 nt, synthetic construct
  misc_feature 1..24: note = Synthetic
  source 1..24: mol_type = other RNA
gcgcgggcctggttgccatgcagg

SEQ ID NO: 17629 - RNA, 18 nt, synthetic construct
  misc_feature 1..18: note = Synthetic
  source 1..18: mol_type = other RNA
gcatgaccgcctcggagg

SEQ ID NO: 17630 - RNA, 19 nt, synthetic construct
  misc_feature 1..19: note = Synthetic
  source 1..19: mol_type = other RNA
cgcatgaccgcctcggagg

SEQ ID NO: 17631 - RNA, 21 nt, synthetic construct
  misc_feature 1..21: note = Synthetic
  source 1..21: mol_type = other RNA
cccgcatgaccgcctcggagg

SEQ ID NO: 17632 - RNA, 22 nt, synthetic construct
  misc_feature 1..22: note = Synthetic
  source 1..22: mol_type = other RNA
tcccgcatgaccgcctcggagg

SEQ ID NO: 17633 - RNA, 23 nt, synthetic construct
  misc_feature 1..23: note = Synthetic
  source 1..23: mol_type = other RNA
ttcccgcatgaccgcctcggagg

SEQ ID NO: 17634 - RNA, 24 nt, synthetic construct
  misc_feature 1..24: note = Synthetic
  source 1..24: mol_type = other RNA
gttcccgcatgaccgcctcggagg

SEQ ID NO: 17635 - RNA, 18 nt, synthetic construct
  misc_feature 1..18: note = Synthetic
  source 1..18: mol_type = other RNA
cccccaggctgacatcgg

SEQ ID NO: 17636 - RNA, 19 nt, synthetic construct
  misc_feature 1..19: note = Synthetic
  source 1..19: mol_type = other RNA
tcccccaggctgacatcgg

SEQ ID NO: 17637 - RNA, 21 nt, synthetic construct
  misc_feature 1..21: note = Synthetic
  source 1..21: mol_type = other RNA
cgtcccccaggctgacatcgg

SEQ ID NO: 17638 - RNA, 22 nt, synthetic construct
  misc_feature 1..22: note = Synthetic
  source 1..22: mol_type = other RNA
tcgtcccccaggctgacatcgg

SEQ ID NO: 17639 - RNA, 23 nt, synthetic construct
  misc_feature 1..23: note = Synthetic
  source 1..23: mol_type = other RNA
ctcgtcccccaggctgacatcgg

SEQ ID NO: 17640 - RNA, 24 nt, synthetic construct
  misc_feature 1..24: note = Synthetic
  source 1..24: mol_type = other RNA
gctcgtcccccaggctgacatcgg

SEQ ID NO: 17641 - RNA, 18 nt, synthetic construct
  misc_feature 1..18: note = Synthetic
  source 1..18: mol_type = other RNA
caggctgacatcggtcgg

SEQ ID NO: 17642 - RNA, 19 nt, synthetic construct
  misc_feature 1..19: note = Synthetic
  source 1..19: mol_type = other RNA
ccaggctgacatcggtcgg

SEQ ID NO: 17643 - RNA, 21 nt, synthetic construct
  misc_feature 1..21: note = Synthetic
  source 1..21: mol_type = other RNA
ccccaggctgacatcggtcgg

SEQ ID NO: 17644 - RNA, 22 nt, synthetic construct
  misc_feature 1..22: note = Synthetic
  source 1..22: mol_type = other RNA
cccccaggctgacatcggtcgg

SEQ ID NO: 17645 - RNA, 23 nt, synthetic construct
  misc_feature 1..23: note = Synthetic
  source 1..23: mol_type = other RNA
tcccccaggctgacatcggtcgg

SEQ ID NO: 17646 - RNA, 24 nt, synthetic construct
  misc_feature 1..24: note = Synthetic
  source 1..24: mol_type = other RNA
gtcccccaggctgacatcggtcgg

SEQ ID NO: 17647 - RNA, 18 nt, synthetic construct
  misc_feature 1..18: note = Synthetic
  source 1..18: mol_type = other RNA
gttgacgaacatgaaggg

SEQ ID NO: 17648 - RNA, 19 nt, synthetic construct
  misc_feature 1..19: note = Synthetic
  source 1..19: mol_type = other RNA
cgttgacgaacatgaaggg

SEQ ID NO: 17649 - RNA, 21 nt, synthetic construct
  misc_feature 1..21: note = Synthetic
  source 1..21: mol_type = other RNA
tccgttgacgaacatgaaggg

SEQ ID NO: 17650 - RNA, 22 nt, synthetic construct
  misc_feature 1..22: note = Synthetic
  source 1..22: mol_type = other RNA
ctccgttgacgaacatgaaggg

SEQ ID NO: 17651 - RNA, 23 nt, synthetic construct
  misc_feature 1..23: note = Synthetic
  source 1..23: mol_type = other RNA
gctccgttgacgaacatgaaggg

SEQ ID NO: 17652 - RNA, 24 nt, synthetic construct
  misc_feature 1..24: note = Synthetic
  source 1..24: mol_type = other RNA
cgctccgttgacgaacatgaaggg

SEQ ID NO: 17653 - RNA, 18 nt, synthetic construct
  misc_feature 1..18: note = Synthetic
  source 1..18: mol_type = other RNA
gcaggtaccggtacaggg

SEQ ID NO: 17654 - RNA, 19 nt, synthetic construct
  misc_feature 1..19: note = Synthetic
  source 1..19: mol_type = other RNA
cgcaggtaccggtacaggg

SEQ ID NO: 17655 - RNA, 21 nt, synthetic construct
  misc_feature 1..21: note = Synthetic
  source 1..21: mol_type = other RNA
cgcgcaggtaccggtacaggg

SEQ ID NO: 17656 - RNA, 22 nt, synthetic construct
  misc_feature 1..22: note = Synthetic
  source 1..22: mol_type = other RNA
gcgcgcaggtaccggtacaggg

SEQ ID NO: 17657 - RNA, 23 nt, synthetic construct
  misc_feature 1..23: note = Synthetic
  source 1..23: mol_type = other RNA
ggcgcgcaggtaccggtacaggg

SEQ ID NO: 17658 - RNA, 24 nt, synthetic construct
  misc_feature 1..24: note = Synthetic
  source 1..24: mol_type = other RNA
tggcgcgcaggtaccggtacaggg

SEQ ID NO: 17659 - RNA, 18 nt, synthetic construct
  misc_feature 1..18: note = Synthetic
  source 1..18: mol_type = other RNA
cctggttgccatgcaggg

SEQ ID NO: 17660 - RNA, 19 nt, synthetic construct
  misc_feature 1..19: note = Synthetic
  source 1..19: mol_type = other RNA
gcctggttgccatgcaggg

SEQ ID NO: 17661 - RNA, 21 nt, synthetic construct
  misc_feature 1..21: note = Synthetic
  source 1..21: mol_type = other RNA
gggcctggttgccatgcaggg

SEQ ID NO: 17662 - RNA, 22 nt, synthetic construct
  misc_feature 1..22: note = Synthetic
  source 1..22: mol_type = other RNA
cgggcctggttgccatgcaggg

SEQ ID NO: 17663 - RNA, 23 nt, synthetic construct
  misc_feature 1..23: note = Synthetic
  source 1..23: mol_type = other RNA
gcgggcctggttgccatgcaggg

SEQ ID NO: 17664 - RNA, 24 nt, synthetic construct
  misc_feature 1..24: note = Synthetic
  source 1..24: mol_type = other RNA
cgcgggcctggttgccatgcaggg

SEQ ID NO: 17665 - RNA, 18 nt, synthetic construct
  misc_feature 1..18: note = Synthetic
  source 1..18: mol_type = other RNA
gcgcgtgtgtcccgcggg

SEQ ID NO: 17666 - RNA, 19 nt, synthetic construct
  misc_feature 1..19: note = Synthetic
  source 1..19: mol_type = other RNA
tgcgcgtgtgtcccgcggg

SEQ ID NO: 17667 - RNA, 21 nt, synthetic construct
  misc_feature 1..21: note = Synthetic
  source 1..21: mol_type = other RNA
tctgcgcgtgtgtcccgcggg

SEQ ID NO: 17668 - RNA, 22 nt, synthetic construct
  misc_feature 1..22: note = Synthetic
  source 1..22: mol_type = other RNA
gtctgcgcgtgtgtcccgcggg

SEQ ID NO: 17669 - RNA, 23 nt, synthetic construct
  misc_feature 1..23: note = Synthetic
  source 1..23: mol_type = other RNA
agtctgcgcgtgtgtcccgcggg

SEQ ID NO: 17670 - RNA, 24 nt, synthetic construct
  misc_feature 1..24: note = Synthetic
  source 1..24: mol_type = other RNA
cagtctgcgcgtgtgtcccgcggg

SEQ ID NO: 17671 - RNA, 18 nt, synthetic construct
  misc_feature 1..18: note = Synthetic
  source 1..18: mol_type = other RNA
tccagagcgccgtagggg

SEQ ID NO: 17672 - RNA, 19 nt, synthetic construct
  misc_feature 1..19: note = Synthetic
  source 1..19: mol_type = other RNA
atccagagcgccgtagggg

SEQ ID NO: 17673 - RNA, 21 nt, synthetic construct
  misc_feature 1..21: note = Synthetic
  source 1..21: mol_type = other RNA
atatccagagcgccgtagggg

SEQ ID NO: 17674 - RNA, 22 nt, synthetic construct
  misc_feature 1..22: note = Synthetic
  source 1..22: mol_type = other RNA
catatccagagcgccgtagggg

SEQ ID NO: 17675 - RNA, 23 nt, synthetic construct
  misc_feature 1..23: note = Synthetic
  source 1..23: mol_type = other RNA
ccatatccagagcgccgtagggg

SEQ ID NO: 17676 - RNA, 24 nt, synthetic construct
  misc_feature 1..24: note = Synthetic
  source 1..24: mol_type = other RNA
gccatatccagagcgccgtagggg

SEQ ID NO: 17677 - RNA, 18 nt, synthetic construct
  misc_feature 1..18: note = Synthetic
  source 1..18: mol_type = other RNA
ggttgccatgcagggtgg

SEQ ID NO: 17678 - RNA, 19 nt, synthetic construct
  misc_feature 1..19: note = Synthetic
  source 1..19: mol_type = other RNA
tggttgccatgcagggtgg

SEQ ID NO: 17679 - RNA, 21 nt, synthetic construct
  misc_feature 1..21: note = Synthetic
  source 1..21: mol_type = other RNA
cctggttgccatgcagggtgg

SEQ ID NO: 17680 - RNA, 22 nt, synthetic construct
  misc_feature 1..22: note = Synthetic
  source 1..22: mol_type = other RNA
gcctggttgccatgcagggtgg

SEQ ID NO: 17681 - RNA, 23 nt, synthetic construct
  misc_feature 1..23: note = Synthetic
  source 1..23: mol_type = other RNA
ggcctggttgccatgcagggtgg

SEQ ID NO: 17682 - RNA, 24 nt, synthetic construct
  misc_feature 1..24: note = Synthetic
  source 1..24: mol_type = other RNA
gggcctggttgccatgcagggtgg

SEQ ID NO: 17683 - RNA, 18 nt, synthetic construct
  misc_feature 1..18: note = Synthetic
  source 1..18: mol_type = other RNA
gctccgttgacgaacatg

SEQ ID NO: 17684 - RNA, 19 nt, synthetic construct
  misc_feature 1..19: note = Synthetic
  source 1..19: mol_type = other RNA
cgctccgttgacgaacatg

SEQ ID NO: 17685 - RNA, 21 nt, synthetic construct
  misc_feature 1..21: note = Synthetic
  source 1..21: mol_type = other RNA
agcgctccgttgacgaacatg

SEQ ID NO: 17686 - RNA, 22 nt, synthetic construct
  misc_feature 1..22: note = Synthetic
  source 1..22: mol_type = other RNA
gagcgctccgttgacgaacatg

SEQ ID NO: 17687 - RNA, 23 nt, synthetic construct
  misc_feature 1..23: note = Synthetic
  source 1..23: mol_type = other RNA
tgagcgctccgttgacgaacatg

SEQ ID NO: 17688 - RNA, 24 nt, synthetic construct
  misc_feature 1..24: note = Synthetic
  source 1..24: mol_type = other RNA
gtgagcgctccgttgacgaacatg

SEQ ID NO: 17689 - RNA, 18 nt, synthetic construct
  misc_feature 1..18: note = Synthetic
  source 1..18: mol_type = other RNA
cgcctggcggtgcagctg

SEQ ID NO: 17690 - RNA, 19 nt, synthetic construct
  misc_feature 1..19: note = Synthetic
  source 1..19: mol_type = other RNA
gcgcctggcggtgcagctg

SEQ ID NO: 17691 - RNA, 21 nt, synthetic construct
  misc_feature 1..21: note = Synthetic
  source 1..21: mol_type = other RNA
gtgcgcctggcggtgcagctg

SEQ ID NO: 17692 - RNA, 22 nt, synthetic construct
  misc_feature 1..22: note = Synthetic
  source 1..22: mol_type = other RNA
tgtgcgcctggcggtgcagctg

SEQ ID NO: 17693 - RNA, 23 nt, synthetic construct
  misc_feature 1..23: note = Synthetic
  source 1..23: mol_type = other RNA
atgtgcgcctggcggtgcagctg

SEQ ID NO: 17694 - RNA, 24 nt, synthetic construct
  misc_feature 1..24: note = Synthetic
  source 1..24: mol_type = other RNA
catgtgcgcctggcggtgcagctg

SEQ ID NO: 17695 - RNA, 18 nt, synthetic construct
  misc_feature 1..18: note = Synthetic
  source 1..18: mol_type = other RNA
acggtgagcgctccgttg

SEQ ID NO: 17696 - RNA, 19 nt, synthetic construct
  misc_feature 1..19: note = Synthetic
  source 1..19: mol_type = other RNA
gacggtgagcgctccgttg

SEQ ID NO: 17697 - RNA, 21 nt, synthetic construct
  misc_feature 1..21: note = Synthetic
  source 1..21: mol_type = other RNA
cggacggtgagcgctccgttg

SEQ ID NO: 17698 - RNA, 22 nt, synthetic construct
  misc_feature 1..22: note = Synthetic
  source 1..22: mol_type = other RNA
ccggacggtgagcgctccgttg

SEQ ID NO: 17699 - RNA, 23 nt, synthetic construct
  misc_feature 1..23: note = Synthetic
  source 1..23: mol_type = other RNA
cccggacggtgagcgctccgttg

SEQ ID NO: 17700 - RNA, 24 nt, synthetic construct
  misc_feature 1..24: note = Synthetic
  source 1..24: mol_type = other RNA
ccccggacggtgagcgctccgttg

SEQ ID NO: 17701 - RNA, 18 nt, synthetic construct
  misc_feature 1..18: note = Synthetic
  source 1..18: mol_type = other RNA
gttcccgcatgaccgcct

SEQ ID NO: 17702 - RNA, 19 nt, synthetic construct
  misc_feature 1..19: note = Synthetic
  source 1..19: mol_type = other RNA
tgttcccgcatgaccgcct

SEQ ID NO: 17703 - RNA, 21 nt, synthetic construct
  misc_feature 1..21: note = Synthetic
  source 1..21: mol_type = other RNA
cgtgttcccgcatgaccgcct

SEQ ID NO: 17704 - RNA, 22 nt, synthetic construct
  misc_feature 1..22: note = Synthetic
  source 1..22: mol_type = other RNA
gcgtgttcccgcatgaccgcct

SEQ ID NO: 17705 - RNA, 23 nt, synthetic construct
  misc_feature 1..23: note = Synthetic
  source 1..23: mol_type = other RNA
cgcgtgttcccgcatgaccgcct

SEQ ID NO: 17706 - RNA, 24 nt, synthetic construct
  misc_feature 1..24: note = Synthetic
  source 1..24: mol_type = other RNA
acgcgtgttcccgcatgaccgcct

SEQ ID NO: 17707 - RNA, 18 nt, synthetic construct
  misc_feature 1..18: note = Synthetic
  source 1..18: mol_type = other RNA
gccgccagccccgcctct

SEQ ID NO: 17708 - RNA, 19 nt, synthetic construct
  misc_feature 1..19: note = Synthetic
  source 1..19: mol_type = other RNA
agccgccagccccgcctct

SEQ ID NO: 17709 - RNA, 21 nt, synthetic construct
  misc_feature 1..21: note = Synthetic
  source 1..21: mol_type = other RNA
ggagccgccagccccgcctct

SEQ ID NO: 17710 - RNA, 22 nt, synthetic construct
  misc_feature 1..22: note = Synthetic
  source 1..22: mol_type = other RNA
cggagccgccagccccgcctct

SEQ ID NO: 17711 - RNA, 23 nt, synthetic construct
  misc_feature 1..23: note = Synthetic
  source 1..23: mol_type = other RNA
gcggagccgccagccccgcctct

SEQ ID NO: 17712 - RNA, 24 nt, synthetic construct
  misc_feature 1..24: note = Synthetic
  source 1..24: mol_type = other RNA
cgcggagccgccagccccgcctct

SEQ ID NO: 17713 - RNA, 18 nt, synthetic construct
  misc_feature 1..18: note = Synthetic
  source 1..18: mol_type = other RNA
ccatatccagagcgccgt

SEQ ID NO: 17714 - RNA, 19 nt, synthetic construct
  misc_feature 1..19: note = Synthetic
  source 1..19: mol_type = other RNA
gccatatccagagcgccgt

SEQ ID NO: 17715 - RNA, 21 nt, synthetic construct
  misc_feature 1..21: note = Synthetic
  source 1..21: mol_type = other RNA
cggccatatccagagcgccgt

SEQ ID NO: 17716 - RNA, 22 nt, synthetic construct
  misc_feature 1..22: note = Synthetic
  source 1..22: mol_type = other RNA
tcggccatatccagagcgccgt

SEQ ID NO: 17717 - RNA, 23 nt, synthetic construct
  misc_feature 1..23: note = Synthetic
  source 1..23: mol_type = other RNA
gtcggccatatccagagcgccgt

SEQ ID NO: 17718 - RNA, 24 nt, synthetic construct
  misc_feature 1..24: note = Synthetic
  source 1..24: mol_type = other RNA
agtcggccatatccagagcgccgt

SEQ ID NO: 17719 - RNA, 18 nt, synthetic construct
  misc_feature 1..18: note = Synthetic
  source 1..18: mol_type = other RNA
cgtagggggcggagtcgt

SEQ ID NO: 17720 - RNA, 19 nt, synthetic construct
  misc_feature 1..19: note = Synthetic
  source 1..19: mol_type = other RNA
ccgtagggggcggagtcgt

SEQ ID NO: 17721 - RNA, 21 nt, synthetic construct
  misc_feature 1..21: note = Synthetic
  source 1..21: mol_type = other RNA
cgccgtagggggcggagtcgt

SEQ ID NO: 17722 - RNA, 22 nt, synthetic construct
  misc_feature 1..22: note = Synthetic
  source 1..22: mol_type = other RNA
gcgccgtagggggcggagtcgt

SEQ ID NO: 17723 - RNA, 23 nt, synthetic construct
  misc_feature 1..23: note = Synthetic
  source 1..23: mol_type = other RNA
agcgccgtagggggcggagtcgt

SEQ ID NO: 17724 - RNA, 24 nt, synthetic construct
  misc_feature 1..24: note = Synthetic
  source 1..24: mol_type = other RNA
gagcgccgtagggggcggagtcgt

SEQ ID NO: 17725 - RNA, 18 nt, synthetic construct
  misc_feature 1..18: note = Synthetic
  source 1..18: mol_type = other RNA
cttcgggggcgtcgtcgt

SEQ ID NO: 17726 - RNA, 19 nt, synthetic construct
  misc_feature 1..19: note = Synthetic
  source 1..19: mol_type = other RNA
tcttcgggggcgtcgtcgt

SEQ ID NO: 17727 - RNA, 21 nt, synthetic construct
  misc_feature 1..21: note = Synthetic
  source 1..21: mol_type = other RNA
cctcttcgggggcgtcgtcgt

SEQ ID NO: 17728 - RNA, 22 nt, synthetic construct
  misc_feature 1..22: note = Synthetic
  source 1..22: mol_type = other RNA
gcctcttcgggggcgtcgtcgt

SEQ ID NO: 17729 - RNA, 23 nt, synthetic construct
  misc_feature 1..23: note = Synthetic
  source 1..23: mol_type = other RNA
cgcctcttcgggggcgtcgtcgt

SEQ ID NO: 17730 - RNA, 24 nt, synthetic construct
  misc_feature 1..24: note = Synthetic
  source 1..24: mol_type = other RNA
ccgcctcttcgggggcgtcgtcgt

SEQ ID NO: 17731 - RNA, 18 nt, synthetic construct
  misc_feature 1..18: note = Synthetic
  source 1..18: mol_type = other RNA
ccccaggctgacatcggt

SEQ ID NO: 17732 - RNA, 19 nt, synthetic construct
  misc_feature 1..19: note = Synthetic
  source 1..19: mol_type = other RNA
cccccaggctgacatcggt

SEQ ID NO: 17733 - RNA, 21 nt, synthetic construct
  misc_feature 1..21: note = Synthetic
  source 1..21: mol_type = other RNA
gtcccccaggctgacatcggt

SEQ ID NO: 17734 - RNA, 22 nt, synthetic construct
  misc_feature 1..22: note = Synthetic
  source 1..22: mol_type = other RNA
cgtcccccaggctgacatcggt

SEQ ID NO: 17735 - RNA, 23 nt, synthetic construct
  misc_feature 1..23: note = Synthetic
  source 1..23: mol_type = other RNA
tcgtcccccaggctgacatcggt

SEQ ID NO: 17736 - RNA, 24 nt, synthetic construct
  misc_feature 1..24: note = Synthetic
  source 1..24: mol_type = other RNA
ctcgtcccccaggctgacatcggt

SEQ ID NO: 17737 - RNA, 18 nt, synthetic construct
  misc_feature 1..18: note = Synthetic
  source 1..18: mol_type = other RNA
ctggttgccatgcagggt

SEQ ID NO: 17738 - RNA, 19 nt, synthetic construct
  misc_feature 1..19: note = Synthetic
  source 1..19: mol_type = other RNA
cctggttgccatgcagggt

SEQ ID NO: 17739 - RNA, 21 nt, synthetic construct
  misc_feature 1..21: note = Synthetic
  source 1..21: mol_type = other RNA
ggcctggttgccatgcagggt

SEQ ID NO: 17740 - RNA, 22 nt, synthetic construct
  misc_feature 1..22: note = Synthetic
  source 1..22: mol_type = other RNA
gggcctggttgccatgcagggt

SEQ ID NO: 17741 - RNA, 23 nt, synthetic construct
  misc_feature 1..23: note = Synthetic
  source 1..23: mol_type = other RNA
cgggcctggttgccatgcagggt

SEQ ID NO: 17742 - RNA, 24 nt, synthetic construct
  misc_feature 1..24: note = Synthetic
  source 1..24: mol_type = other RNA
gcgggcctggttgccatgcagggt

SEQ ID NO: 17743 - RNA, 18 nt, synthetic construct
  misc_feature 1..18: note = Synthetic
  source 1..18: mol_type = other RNA
ccgccagccccgcctctt

SEQ ID NO: 17744 - RNA, 19 nt, synthetic construct
  misc_feature 1..19: note = Synthetic
  source 1..19: mol_type = other RNA
gccgccagccccgcctctt

SEQ ID NO: 17745 - RNA, 21 nt, synthetic construct
  misc_feature 1..21: note = Synthetic
  source 1..21: mol_type = other RNA
gagccgccagccccgcctctt

SEQ ID NO: 17746 - RNA, 22 nt, synthetic construct
  misc_feature 1..22: note = Synthetic
  source 1..22: mol_type = other RNA
ggagccgccagccccgcctctt

SEQ ID NO: 17747 - RNA, 23 nt, synthetic construct
  misc_feature 1..23: note = Synthetic
  source 1..23: mol_type = other RNA
cggagccgccagccccgcctctt

SEQ ID NO: 17748 - RNA, 24 nt, synthetic construct
  misc_feature 1..24: note = Synthetic
  source 1..24: mol_type = other RNA
gcggagccgccagccccgcctctt

SEQ ID NO: 17749 - RNA, 18 nt, synthetic construct
  misc_feature 1..18: note = Synthetic
  source 1..18: mol_type = other RNA
ccgtccggggagtgccaa

SEQ ID NO: 17750 - RNA, 19 nt, synthetic construct
  misc_feature 1..19: note = Synthetic
  source 1..19: mol_type = other RNA
accgtccggggagtgccaa

SEQ ID NO: 17751 - RNA, 21 nt, synthetic construct
  misc_feature 1..21: note = Synthetic
  source 1..21: mol_type = other RNA
tcaccgtccggggagtgccaa

SEQ ID NO: 17752 - RNA, 22 nt, synthetic construct
  misc_feature 1..22: note = Synthetic
  source 1..22: mol_type = other RNA
ctcaccgtccggggagtgccaa

SEQ ID NO: 17753 - RNA, 23 nt, synthetic construct
  misc_feature 1..23: note = Synthetic
  source 1..23: mol_type = other RNA
gctcaccgtccggggagtgccaa

SEQ ID NO: 17754 - RNA, 24 nt, synthetic construct
  misc_feature 1..24: note = Synthetic
  source 1..24: mol_type = other RNA
cgctcaccgtccggggagtgccaa

SEQ ID NO: 17755 - RNA, 18 nt, synthetic construct
  misc_feature 1..18: note = Synthetic
  source 1..18: mol_type = other RNA
gcccttcatgttcgtcaa

SEQ ID NO: 17756 - RNA, 19 nt, synthetic construct
  misc_feature 1..19: note = Synthetic
  source 1..19: mol_type = other RNA
agcccttcatgttcgtcaa

SEQ ID NO: 17757 - RNA, 21 nt, synthetic construct
  misc_feature 1..21: note = Synthetic
  source 1..21: mol_type = other RNA
ccagcccttcatgttcgtcaa

SEQ ID NO: 17758 - RNA, 22 nt, synthetic construct
  misc_feature 1..22: note = Synthetic
  source 1..22: mol_type = other RNA
tccagcccttcatgttcgtcaa

SEQ ID NO: 17759 - RNA, 23 nt, synthetic construct
  misc_feature 1..23: note = Synthetic
  source 1..23: mol_type = other RNA
ttccagcccttcatgttcgtcaa

SEQ ID NO: 17760 - RNA, 24 nt, synthetic construct
  misc_feature 1..24: note = Synthetic
  source 1..24: mol_type = other RNA
gttccagcccttcatgttcgtcaa

SEQ ID NO: 17761 - RNA, 18 nt, synthetic construct
  misc_feature 1..18: note = Synthetic
  source 1..18: mol_type = other RNA
acaattacgggtctacca

SEQ ID NO: 17762 - RNA, 19 nt, synthetic construct
  misc_feature 1..19: note = Synthetic
  source 1..19: mol_type = other RNA
aacaattacgggtctacca

SEQ ID NO: 17763 - RNA, 21 nt, synthetic construct
  misc_feature 1..21: note = Synthetic
  source 1..21: mol_type = other RNA
aaaacaattacgggtctacca

SEQ ID NO: 17764 - RNA, 22 nt, synthetic construct
  misc_feature 1..22: note = Synthetic
  source 1..22: mol_type = other RNA
aaaaacaattacgggtctacca

SEQ ID NO: 17765 - RNA, 23 nt, synthetic construct
  misc_feature 1..23: note = Synthetic
  source 1..23: mol_type = other RNA
gaaaaacaattacgggtctacca

SEQ ID NO: 17766 - RNA, 24 nt, synthetic construct
  misc_feature 1..24: note = Synthetic
  source 1..24: mol_type = other RNA
cgaaaaacaattacgggtctacca

SEQ ID NO: 17767 - RNA, 18 nt, synthetic construct
  misc_feature 1..18: note = Synthetic
  source 1..18: mol_type = other RNA
agcccttcatgttcgtca

SEQ ID NO: 17768 - RNA, 19 nt, synthetic construct
  misc_feature 1..19: note = Synthetic
  source 1..19: mol_type = other RNA
cagcccttcatgttcgtca

SEQ ID NO: 17769 - RNA, 21 nt, synthetic construct
  misc_feature 1..21: note = Synthetic
  source 1..21: mol_type = other RNA
tccagcccttcatgttcgtca

SEQ ID NO: 17770 - RNA, 22 nt, synthetic construct
  misc_feature 1..22: note = Synthetic
  source 1..22: mol_type = other RNA
ttccagcccttcatgttcgtca

SEQ ID NO: 17771 - RNA, 23 nt, synthetic construct
  misc_feature 1..23: note = Synthetic
  source 1..23: mol_type = other RNA
gttccagcccttcatgttcgtca

SEQ ID NO: 17772 - RNA, 24 nt, synthetic construct
  misc_feature 1..24: note = Synthetic
  source 1..24: mol_type = other RNA
tgttccagcccttcatgttcgtca

SEQ ID NO: 17773 - RNA, 18 nt, synthetic construct
  misc_feature 1..18: note = Synthetic
  source 1..18: mol_type = other RNA
ggtgggtagggggcgcga

SEQ ID NO: 17774 - RNA, 19 nt, synthetic construct
  misc_feature 1..19: note = Synthetic
  source 1..19: mol_type = other RNA
cggtgggtagggggcgcga

SEQ ID NO: 17775 - RNA, 20 nt, synthetic construct
  misc_feature 1..20: note = Synthetic
  source 1..20: mol_type = other RNA
acggtgggtagggggcgcga

SEQ ID NO: 17776 - RNA, 21 nt, synthetic construct
  misc_feature 1..21: note = Synthetic
  source 1..21: mol_type = other RNA
tacggtgggtagggggcgcga

SEQ ID NO: 17777 - RNA, 22 nt, synthetic construct
  misc_feature 1..22: note = Synthetic
  source 1..22: mol_type = other RNA
gtacggtgggtagggggcgcga

SEQ ID NO: 17778 - RNA, 23 nt, synthetic construct
  misc_feature 1..23: note = Synthetic
  source 1..23: mol_type = other RNA
agtacggtgggtagggggcgcga

SEQ ID NO: 17779 - RNA, 24 nt, synthetic construct
  misc_feature 1..24: note = Synthetic
  source 1..24: mol_type = other RNA
gagtacggtgggtagggggcgcga

SEQ ID NO: 17780 - RNA, 18 nt, synthetic construct
  misc_feature 1..18: note = Synthetic
  source 1..18: mol_type = other RNA
tctggacatgttggggga

SEQ ID NO: 17781 - RNA, 19 nt, synthetic construct
  misc_feature 1..19: note = Synthetic
  source 1..19: mol_type = other RNA
atctggacatgttggggga

SEQ ID NO: 17782 - RNA, 21 nt, synthetic construct
  misc_feature 1..21: note = Synthetic
  source 1..21: mol_type = other RNA
cgatctggacatgttggggga

SEQ ID NO: 17783 - RNA, 22 nt, synthetic construct
  misc_feature 1..22: note = Synthetic
  source 1..22: mol_type = other RNA
tcgatctggacatgttggggga

SEQ ID NO: 17784 - RNA, 23 nt, synthetic construct
  misc_feature 1..23: note = Synthetic
  source 1..23: mol_type = other RNA
ttcgatctggacatgttggggga

SEQ ID NO: 17785 - RNA, 24 nt, synthetic construct
  misc_feature 1..24: note = Synthetic
  source 1..24: mol_type = other RNA
tttcgatctggacatgttggggga

SEQ ID NO: 17786 - RNA, 18 nt, synthetic construct
  misc_feature 1..18: note = Synthetic
  source 1..18: mol_type = other RNA
gatcgcggacaggtacta

SEQ ID NO: 17787 - RNA, 19 nt, synthetic construct
  misc_feature 1..19: note = Synthetic
  source 1..19: mol_type = other RNA
cgatcgcggacaggtacta

SEQ ID NO: 17788 - RNA, 21 nt, synthetic construct
  misc_feature 1..21: note = Synthetic
  source 1..21: mol_type = other RNA
cacgatcgcggacaggtacta

SEQ ID NO: 17789 - RNA, 22 nt, synthetic construct
  misc_feature 1..22: note = Synthetic
  source 1..22: mol_type = other RNA
ccacgatcgcggacaggtacta

SEQ ID NO: 17790 - RNA, 23 nt, synthetic construct
  misc_feature 1..23: note = Synthetic
  source 1..23: mol_type = other RNA
gccacgatcgcggacaggtacta

SEQ ID NO: 17791 - RNA, 24 nt, synthetic construct
  misc_feature 1..24: note = Synthetic
  source 1..24: mol_type = other RNA
cgccacgatcgcggacaggtacta

SEQ ID NO: 17792 - RNA, 18 nt, synthetic construct
  misc_feature 1..18: note = Synthetic
  source 1..18: mol_type = other RNA
tggtgcgcagcgcggcta

SEQ ID NO: 17793 - RNA, 19 nt, synthetic construct
  misc_feature 1..19: note = Synthetic
  source 1..19: mol_type = other RNA
ctggtgcgcagcgcggcta

SEQ ID NO: 17794 - RNA, 21 nt, synthetic construct
  misc_feature 1..21: note = Synthetic
  source 1..21: mol_type = other RNA
cgctggtgcgcagcgcggcta

SEQ ID NO: 17795 - RNA, 22 nt, synthetic construct
  misc_feature 1..22: note = Synthetic
  source 1..22: mol_type = other RNA
ccgctggtgcgcagcgcggcta

SEQ ID NO: 17796 - RNA, 23 nt, synthetic construct
  misc_feature 1..23: note = Synthetic
  source 1..23: mol_type = other RNA
cccgctggtgcgcagcgcggcta

SEQ ID NO: 17797 - RNA, 24 nt, synthetic construct
  misc_feature 1..24: note = Synthetic
  source 1..24: mol_type = other RNA
tcccgctggtgcgcagcgcggcta

SEQ ID NO: 17798 - RNA, 18 nt, synthetic construct
  misc_feature 1..18: note = Synthetic
  source 1..18: mol_type = other RNA
tgacgagtacggtgggta

SEQ ID NO: 17799 - RNA, 19 nt, synthetic construct
  misc_feature 1..19: note = Synthetic
  source 1..19: mol_type = other RNA
ttgacgagtacggtgggta

SEQ ID NO: 17800 - RNA, 21 nt, synthetic construct
  misc_feature 1..21: note = Synthetic
  source 1..21: mol_type = other RNA
aattgacgagtacggtgggta

SEQ ID NO: 17801 - RNA, 22 nt, synthetic construct
  misc_feature 1..22: note = Synthetic
  source 1..22: mol_type = other RNA
gaattgacgagtacggtgggta

SEQ ID NO: 17802 - RNA, 23 nt, synthetic construct
  misc_feature 1..23: note = Synthetic
  source 1..23: mol_type = other RNA
ggaattgacgagtacggtgggta

SEQ ID NO: 17803 - RNA, 24 nt, synthetic construct
  misc_feature 1..24: note = Synthetic
  source 1..24: mol_type = other RNA
tggaattgacgagtacggtgggta

SEQ ID NO: 17804 - RNA, 18 nt, synthetic construct
  misc_feature 1..18: note = Synthetic
  source 1..18: mol_type = other RNA
cgcggacgcgatcgcgac

SEQ ID NO: 17805 - RNA, 19 nt, synthetic construct
  misc_feature 1..19: note = Synthetic
  source 1..19: mol_type = other RNA
gcgcggacgcgatcgcgac

SEQ ID NO: 17806 - RNA, 21 nt, synthetic construct
  misc_feature 1..21: note = Synthetic
  source 1..21: mol_type = other RNA
atgcgcggacgcgatcgcgac

SEQ ID NO: 17807 - RNA, 22 nt, synthetic construct
  misc_feature 1..22: note = Synthetic
  source 1..22: mol_type = other RNA
catgcgcggacgcgatcgcgac

SEQ ID NO: 17808 - RNA, 23 nt, synthetic construct
  misc_feature 1..23: note = Synthetic
  source 1..23: mol_type = other RNA
acatgcgcggacgcgatcgcgac

SEQ ID NO: 17809 - RNA, 24 nt, synthetic construct
  misc_feature 1..24: note = Synthetic
  source 1..24: mol_type = other RNA
cacatgcgcggacgcgatcgcgac

SEQ ID NO: 17810 - RNA, 18 nt, synthetic construct
  misc_feature 1..18: note = Synthetic
  source 1..18: mol_type = other RNA
gactgcctctgttgcgac

SEQ ID NO: 17811 - RNA, 19 nt, synthetic construct
  misc_feature 1..19: note = Synthetic
  source 1..19: mol_type = other RNA
tgactgcctctgttgcgac

SEQ ID NO: 17812 - RNA, 21 nt, synthetic construct
  misc_feature 1..21: note = Synthetic
  source 1..21: mol_type = other RNA
tttgactgcctctgttgcgac

SEQ ID NO: 17813 - RNA, 22 nt, synthetic construct
  misc_feature 1..22: note = Synthetic
  source 1..22: mol_type = other RNA
gtttgactgcctctgttgcgac

SEQ ID NO: 17814 - RNA, 23 nt, synthetic construct
  misc_feature 1..23: note = Synthetic
  source 1..23: mol_type = other RNA
tgtttgactgcctctgttgcgac

SEQ ID NO: 17815 - RNA, 24 nt, synthetic construct
  misc_feature 1..24: note = Synthetic
  source 1..24: mol_type = other RNA
ctgtttgactgcctctgttgcgac

SEQ ID NO: 17816 - RNA, 18 nt, synthetic construct
  misc_feature 1..18: note = Synthetic
  source 1..18: mol_type = other RNA
gcggacgcgatcgcgacc

SEQ ID NO: 17817 - RNA, 19 nt, synthetic construct
  misc_feature 1..19: note = Synthetic
  source 1..19: mol_type = other RNA
cgcggacgcgatcgcgacc

SEQ ID NO: 17818 - RNA, 21 nt, synthetic construct
  misc_feature 1..21: note = Synthetic
  source 1..21: mol_type = other RNA
tgcgcggacgcgatcgcgacc

SEQ ID NO: 17819 - RNA, 22 nt, synthetic construct
  misc_feature 1..22: note = Synthetic
  source 1..22: mol_type = other RNA
atgcgcggacgcgatcgcgacc

SEQ ID NO: 17820 - RNA, 23 nt, synthetic construct
  misc_feature 1..23: note = Synthetic
  source 1..23: mol_type = other RNA
catgcgcggacgcgatcgcgacc

SEQ ID NO: 17821 - RNA, 24 nt, synthetic construct
  misc_feature 1..24: note = Synthetic
  source 1..24: mol_type = other RNA
acatgcgcggacgcgatcgcgacc

SEQ ID NO: 17822 - RNA, 18 nt, synthetic construct
  misc_feature 1..18: note = Synthetic
  source 1..18: mol_type = other RNA
actgcctctgttgcgacc

SEQ ID NO: 17823 - RNA, 19 nt, synthetic construct
  misc_feature 1..19: note = Synthetic
  source 1..19: mol_type = other RNA
gactgcctctgttgcgacc

SEQ ID NO: 17824 - RNA, 21 nt, synthetic construct
  misc_feature 1..21: note = Synthetic
  source 1..21: mol_type = other RNA
ttgactgcctctgttgcgacc

SEQ ID NO: 17825 - RNA, 22 nt, synthetic construct
  misc_feature 1..22: note = Synthetic
  source 1..22: mol_type = other RNA
tttgactgcctctgttgcgacc

SEQ ID NO: 17826 - RNA, 23 nt, synthetic construct
  misc_feature 1..23: note = Synthetic
  source 1..23: mol_type = other RNA
gtttgactgcctctgttgcgacc

SEQ ID NO: 17827 - RNA, 24 nt, synthetic construct
  misc_feature 1..24: note = Synthetic
  source 1..24: mol_type = other RNA
tgtttgactgcctctgttgcgacc

SEQ ID NO: 17828 - RNA, 18 nt, synthetic construct
  misc_feature 1..18: note = Synthetic
  source 1..18: mol_type = other RNA
tcgcggacaggtactacc

SEQ ID NO: 17829 - RNA, 19 nt, synthetic construct
  misc_feature 1..19: note = Synthetic
  source 1..19: mol_type = other RNA
atcgcggacaggtactacc

SEQ ID NO: 17830 - RNA, 21 nt, synthetic construct
  misc_feature 1..21: note = Synthetic
  source 1..21: mol_type = other RNA
cgatcgcggacaggtactacc

SEQ ID NO: 17831 - RNA, 22 nt, synthetic construct
  misc_feature 1..22: note = Synthetic
  source 1..22: mol_type = other RNA
acgatcgcggacaggtactacc

SEQ ID NO: 17832 - RNA, 23 nt, synthetic construct
  misc_feature 1..23: note = Synthetic
  source 1..23: mol_type = other RNA
cacgatcgcggacaggtactacc

SEQ ID NO: 17833 - RNA, 24 nt, synthetic construct
  misc_feature 1..24: note = Synthetic
  source 1..24: mol_type = other RNA
ccacgatcgcggacaggtactacc

SEQ ID NO: 17834 - RNA, 18 nt, synthetic construct
  misc_feature 1..18: note = Synthetic
  source 1..18: mol_type = other RNA
tgtatctatttttgaccc

SEQ ID NO: 17835 - RNA, 19 nt, synthetic construct
  misc_feature 1..19: note = Synthetic
  source 1..19: mol_type = other RNA
ttgtatctatttttgaccc

SEQ ID NO: 17836 - RNA, 21 nt, synthetic construct
  misc_feature 1..21: note = Synthetic
  source 1..21: mol_type = other RNA
atttgtatctatttttgaccc

SEQ ID NO: 17837 - RNA, 22 nt, synthetic construct
  misc_feature 1..22: note = Synthetic
  source 1..22: mol_type = other RNA
catttgtatctatttttgaccc

SEQ ID NO: 17838 - RNA, 23 nt, synthetic construct
  misc_feature 1..23: note = Synthetic
  source 1..23: mol_type = other RNA
gcatttgtatctatttttgaccc

SEQ ID NO: 17839 - RNA, 24 nt, synthetic construct
  misc_feature 1..24: note = Synthetic
  source 1..24: mol_type = other RNA
tgcatttgtatctatttttgaccc

SEQ ID NO: 17840 - RNA, 18 nt, synthetic construct
  misc_feature 1..18: note = Synthetic
  source 1..18: mol_type = other RNA
cgcctgtcctttctcccc

SEQ ID NO: 17841 - RNA, 19 nt, synthetic construct
  misc_feature 1..19: note = Synthetic
  source 1..19: mol_type = other RNA
gcgcctgtcctttctcccc

SEQ ID NO: 17842 - RNA, 21 nt, synthetic construct
  misc_feature 1..21: note = Synthetic
  source 1..21: mol_type = other RNA
ccgcgcctgtcctttctcccc

SEQ ID NO: 17843 - RNA, 22 nt, synthetic construct
  misc_feature 1..22: note = Synthetic
  source 1..22: mol_type = other RNA
tccgcgcctgtcctttctcccc

SEQ ID NO: 17844 - RNA, 23 nt, synthetic construct
  misc_feature 1..23: note = Synthetic
  source 1..23: mol_type = other RNA
ctccgcgcctgtcctttctcccc

SEQ ID NO: 17845 - RNA, 24 nt, synthetic construct
  misc_feature 1..24: note = Synthetic
  source 1..24: mol_type = other RNA
gctccgcgcctgtcctttctcccc

SEQ ID NO: 17846 - RNA, 18 nt, synthetic construct
  misc_feature 1..18: note = Synthetic
  source 1..18: mol_type = other RNA
tcccggacgacgacgccc

SEQ ID NO: 17847 - RNA, 19 nt, synthetic construct
  misc_feature 1..19: note = Synthetic
  source 1..19: mol_type = other RNA
ctcccggacgacgacgccc

SEQ ID NO: 17848 - RNA, 21 nt, synthetic construct
  misc_feature 1..21: note = Synthetic
  source 1..21: mol_type = other RNA
atctcccggacgacgacgccc

SEQ ID NO: 17849 - RNA, 22 nt, synthetic construct
  misc_feature 1..22: note = Synthetic
  source 1..22: mol_type = other RNA
gatctcccggacgacgacgccc

SEQ ID NO: 17850 - RNA, 23 nt, synthetic construct
  misc_feature 1..23: note = Synthetic
  source 1..23: mol_type = other RNA
cgatctcccggacgacgacgccc

SEQ ID NO: 17851 - RNA, 24 nt, synthetic construct
  misc_feature 1..24: note = Synthetic
  source 1..24: mol_type = other RNA
tcgatctcccggacgacgacgccc

SEQ ID NO: 17852 - RNA, 18 nt, synthetic construct
  misc_feature 1..18: note = Synthetic
  source 1..18: mol_type = other RNA
agatgtttaccgatgccc

SEQ ID NO: 17853 - RNA, 19 nt, synthetic construct
  misc_feature 1..19: note = Synthetic
  source 1..19: mol_type = other RNA
cagatgtttaccgatgccc

SEQ ID NO: 17854 - RNA, 21 nt, synthetic construct
  misc_feature 1..21: note = Synthetic
  source 1..21: mol_type = other RNA
agcagatgtttaccgatgccc

SEQ ID NO: 17855 - RNA, 22 nt, synthetic construct
  misc_feature 1..22: note = Synthetic
  source 1..22: mol_type = other RNA
gagcagatgtttaccgatgccc

SEQ ID NO: 17856 - RNA, 23 nt, synthetic construct
  misc_feature 1..23: note = Synthetic
  source 1..23: mol_type = other RNA
tgagcagatgtttaccgatgccc

SEQ ID NO: 17857 - RNA, 24 nt, synthetic construct
  misc_feature 1..24: note = Synthetic
  source 1..24: mol_type = other RNA
ttgagcagatgtttaccgatgccc

SEQ ID NO: 17858 - RNA, 18 nt, synthetic construct
  misc_feature 1..18: note = Synthetic
  source 1..18: mol_type = other RNA
tgggggacggggattccc

SEQ ID NO: 17859 - RNA, 19 nt, synthetic construct
  misc_feature 1..19: note = Synthetic
  source 1..19: mol_type = other RNA
ttgggggacggggattccc

SEQ ID NO: 17860 - RNA, 21 nt, synthetic construct
  misc_feature 1..21: note = Synthetic
  source 1..21: mol_type = other RNA
tgttgggggacggggattccc

SEQ ID NO: 17861 - RNA, 22 nt, synthetic construct
  misc_feature 1..22: note = Synthetic
  source 1..22: mol_type = other RNA
atgttgggggacggggattccc

SEQ ID NO: 17862 - RNA, 23 nt, synthetic construct
  misc_feature 1..23: note = Synthetic
  source 1..23: mol_type = other RNA
catgttgggggacggggattccc

SEQ ID NO: 17863 - RNA, 24 nt, synthetic construct
  misc_feature 1..24: note = Synthetic
  source 1..24: mol_type = other RNA
acatgttgggggacggggattccc

SEQ ID NO: 17864 - RNA, 18 nt, synthetic construct
  misc_feature 1..18: note = Synthetic
  source 1..18: mol_type = other RNA
ccccgaccgatgtcagcc

SEQ ID NO: 17865 - RNA, 19 nt, synthetic construct
  misc_feature 1..19: note = Synthetic
  source 1..19: mol_type = other RNA
cccccgaccgatgtcagcc

SEQ ID NO: 17866 - RNA, 21 nt, synthetic construct
  misc_feature 1..21: note = Synthetic
  source 1..21: mol_type = other RNA
cccccccgaccgatgtcagcc

SEQ ID NO: 17867 - RNA, 22 nt, synthetic construct
  misc_feature 1..22: note = Synthetic
  source 1..22: mol_type = other RNA
gcccccccgaccgatgtcagcc

SEQ ID NO: 17868 - RNA, 23 nt, synthetic construct
  misc_feature 1..23: note = Synthetic
  source 1..23: mol_type = other RNA
ggcccccccgaccgatgtcagcc

SEQ ID NO: 17869 - RNA, 24 nt, synthetic construct
  misc_feature 1..24: note = Synthetic
  source 1..24: mol_type = other RNA
cggcccccccgaccgatgtcagcc

SEQ ID NO: 17870 - RNA, 18 nt, synthetic construct
  misc_feature 1..18: note = Synthetic
  source 1..18: mol_type = other RNA
cgcggctacggaggagcc

SEQ ID NO: 17871 - RNA, 19 nt, synthetic construct
  misc_feature 1..19: note = Synthetic
  source 1..19: mol_type = other RNA
gcgcggctacggaggagcc

SEQ ID NO: 17872 - RNA, 21 nt, synthetic construct
  misc_feature 1..21: note = Synthetic
  source 1..21: mol_type = other RNA
cagcgcggctacggaggagcc

SEQ ID NO: 17873 - RNA, 22 nt, synthetic construct
  misc_feature 1..22: note = Synthetic
  source 1..22: mol_type = other RNA
gcagcgcggctacggaggagcc

SEQ ID NO: 17874 - RNA, 23 nt, synthetic construct
  misc_feature 1..23: note = Synthetic
  source 1..23: mol_type = other RNA
cgcagcgcggctacggaggagcc

SEQ ID NO: 17875 - RNA, 24 nt, synthetic construct
  misc_feature 1..24: note = Synthetic
  source 1..24: mol_type = other RNA
gcgcagcgcggctacggaggagcc

SEQ ID NO: 17876 - RNA, 18 nt, synthetic construct
  misc_feature 1..18: note = Synthetic
  source 1..18: mol_type = other RNA
acggagcgctcaccgtcc

SEQ ID NO: 17877 - RNA, 19 nt, synthetic construct
  misc_feature 1..19: note = Synthetic
  source 1..19: mol_type = other RNA
aacggagcgctcaccgtcc

SEQ ID NO: 17878 - RNA, 21 nt, synthetic construct
  misc_feature 1..21: note = Synthetic
  source 1..21: mol_type = other RNA
tcaacggagcgctcaccgtcc

SEQ ID NO: 17879 - RNA, 22 nt, synthetic construct
  misc_feature 1..22: note = Synthetic
  source 1..22: mol_type = other RNA
gtcaacggagcgctcaccgtcc

SEQ ID NO: 17880 - RNA, 23 nt, synthetic construct
  misc_feature 1..23: note = Synthetic
  source 1..23: mol_type = other RNA
cgtcaacggagcgctcaccgtcc

SEQ ID NO: 17881 - RNA, 24 nt, synthetic construct
  misc_feature 1..24: note = Synthetic
  source 1..24: mol_type = other RNA
tcgtcaacggagcgctcaccgtcc

SEQ ID NO: 17882 - RNA, 18 nt, synthetic construct
  misc_feature 1..18: note = Synthetic
  source 1..18: mol_type = other RNA
ttgggggacggggattcc

SEQ ID NO: 17883 - RNA, 19 nt, synthetic construct
  misc_feature 1..19: note = Synthetic
  source 1..19: mol_type = other RNA
gttgggggacggggattcc

SEQ ID NO: 17884 - RNA, 21 nt, synthetic construct
  misc_feature 1..21: note = Synthetic
  source 1..21: mol_type = other RNA
atgttgggggacggggattcc

SEQ ID NO: 17885 - RNA, 22 nt, synthetic construct
  misc_feature 1..22: note = Synthetic
  source 1..22: mol_type = other RNA
catgttgggggacggggattcc

SEQ ID NO: 17886 - RNA, 23 nt, synthetic construct
  misc_feature 1..23: note = Synthetic
  source 1..23: mol_type = other RNA
acatgttgggggacggggattcc

SEQ ID NO: 17887 - RNA, 24 nt, synthetic construct
  misc_feature 1..24: note = Synthetic
  source 1..24: mol_type = other RNA
gacatgttgggggacggggattcc

SEQ ID NO: 17888 - RNA, 18 nt, synthetic construct
  misc_feature 1..18: note = Synthetic
  source 1..18: mol_type = other RNA
cccccgaccgatgtcagc

SEQ ID NO: 17889 - RNA, 19 nt, synthetic construct
  misc_feature 1..19: note = Synthetic
  source 1..19: mol_type = other RNA
ccccccgaccgatgtcagc

SEQ ID NO: 17890 - RNA, 21 nt, synthetic construct
  misc_feature 1..21: note = Synthetic
  source 1..21: mol_type = other RNA
gcccccccgaccgatgtcagc

SEQ ID NO: 17891 - RNA, 22 nt, synthetic construct
  misc_feature 1..22: note = Synthetic
  source 1..22: mol_type = other RNA
ggcccccccgaccgatgtcagc

SEQ ID NO: 17892 - RNA, 23 nt, synthetic construct
  misc_feature 1..23: note = Synthetic
  source 1..23: mol_type = other RNA
cggcccccccgaccgatgtcagc

SEQ ID NO: 17893 - RNA, 24 nt, synthetic construct
  misc_feature 1..24: note = Synthetic
  source 1..24: mol_type = other RNA
acggcccccccgaccgatgtcagc

SEQ ID NO: 17894 - RNA, 18 nt, synthetic construct
  misc_feature 1..18: note = Synthetic
  source 1..18: mol_type = other RNA
gcgcggctacggaggagc

SEQ ID NO: 17895 - RNA, 19 nt, synthetic construct
  misc_feature 1..19: note = Synthetic
  source 1..19: mol_type = other RNA
agcgcggctacggaggagc

SEQ ID NO: 17896 - RNA, 21 nt, synthetic construct
  misc_feature 1..21: note = Synthetic
  source 1..21: mol_type = other RNA
gcagcgcggctacggaggagc

SEQ ID NO: 17897 - RNA, 22 nt, synthetic construct
  misc_feature 1..22: note = Synthetic
  source 1..22: mol_type = other RNA
cgcagcgcggctacggaggagc

SEQ ID NO: 17898 - RNA, 23 nt, synthetic construct
  misc_feature 1..23: note = Synthetic
  source 1..23: mol_type = other RNA
gcgcagcgcggctacggaggagc

SEQ ID NO: 17899 - RNA, 24 nt, synthetic construct
  misc_feature 1..24: note = Synthetic
  source 1..24: mol_type = other RNA
tgcgcagcgcggctacggaggagc

SEQ ID NO: 17900 - RNA, 18 nt, synthetic construct
  misc_feature 1..18: note = Synthetic
  source 1..18: mol_type = other RNA
gagctccacttagacggc

SEQ ID NO: 17901 - RNA, 19 nt, synthetic construct
  misc_feature 1..19: note = Synthetic
  source 1..19: mol_type = other RNA
cgagctccacttagacggc

SEQ ID NO: 17902 - RNA, 21 nt, synthetic construct
  misc_feature 1..21: note = Synthetic
  source 1..21: mol_type = other RNA
gacgagctccacttagacggc

SEQ ID NO: 17903 - RNA, 22 nt, synthetic construct
  misc_feature 1..22: note = Synthetic
  source 1..22: mol_type = other RNA
ggacgagctccacttagacggc

SEQ ID NO: 17904 - RNA, 23 nt, synthetic construct
  misc_feature 1..23: note = Synthetic
  source 1..23: mol_type = other RNA
gggacgagctccacttagacggc

SEQ ID NO: 17905 - RNA, 24 nt, synthetic construct
  misc_feature 1..24: note = Synthetic
  source 1..24: mol_type = other RNA
ggggacgagctccacttagacggc

SEQ ID NO: 17906 - RNA, 18 nt, synthetic construct
  misc_feature 1..18: note = Synthetic
  source 1..18: mol_type = other RNA
accgccaggcgcacatgc

SEQ ID NO: 17907 - RNA, 19 nt, synthetic construct
  misc_feature 1..19: note = Synthetic
  source 1..19: mol_type = other RNA
caccgccaggcgcacatgc

SEQ ID NO: 17908 - RNA, 21 nt, synthetic construct
  misc_feature 1..21: note = Synthetic
  source 1..21: mol_type = other RNA
tgcaccgccaggcgcacatgc

SEQ ID NO: 17909 - RNA, 22 nt, synthetic construct
  misc_feature 1..22: note = Synthetic
  source 1..22: mol_type = other RNA
ctgcaccgccaggcgcacatgc

SEQ ID NO: 17910 - RNA, 23 nt, synthetic construct
  misc_feature 1..23: note = Synthetic
  source 1..23: mol_type = other RNA
gctgcaccgccaggcgcacatgc

SEQ ID NO: 17911 - RNA, 24 nt, synthetic construct
  misc_feature 1..24: note = Synthetic
  source 1..24: mol_type = other RNA
agctgcaccgccaggcgcacatgc

SEQ ID NO: 17912 - RNA, 18 nt, synthetic construct
  misc_feature 1..18: note = Synthetic
  source 1..18: mol_type = other RNA
cctccgaggcggtcatgc

SEQ ID NO: 17913 - RNA, 19 nt, synthetic construct
  misc_feature 1..19: note = Synthetic
  source 1..19: mol_type = other RNA
ccctccgaggcggtcatgc

SEQ ID NO: 17914 - RNA, 21 nt, synthetic construct
  misc_feature 1..21: note = Synthetic
  source 1..21: mol_type = other RNA
cgccctccgaggcggtcatgc

SEQ ID NO: 17915 - RNA, 22 nt, synthetic construct
  misc_feature 1..22: note = Synthetic
  source 1..22: mol_type = other RNA
tcgccctccgaggcggtcatgc

SEQ ID NO: 17916 - RNA, 23 nt, synthetic construct
  misc_feature 1..23: note = Synthetic
  source 1..23: mol_type = other RNA
ctcgccctccgaggcggtcatgc

SEQ ID NO: 17917 - RNA, 24 nt, synthetic construct
  misc_feature 1..24: note = Synthetic
  source 1..24: mol_type = other RNA
cctcgccctccgaggcggtcatgc

SEQ ID NO: 17918 - RNA, 18 nt, synthetic construct
  misc_feature 1..18: note = Synthetic
  source 1..18: mol_type = other RNA
tcgaggcccgccggctgc

SEQ ID NO: 17919 - RNA, 19 nt, synthetic construct
  misc_feature 1..19: note = Synthetic
  source 1..19: mol_type = other RNA
atcgaggcccgccggctgc

SEQ ID NO: 17920 - RNA, 21 nt, synthetic construct
  misc_feature 1..21: note = Synthetic
  source 1..21: mol_type = other RNA
caatcgaggcccgccggctgc

SEQ ID NO: 17921 - RNA, 22 nt, synthetic construct
  misc_feature 1..22: note = Synthetic
  source 1..22: mol_type = other RNA
ccaatcgaggcccgccggctgc

SEQ ID NO: 17922 - RNA, 23 nt, synthetic construct
  misc_feature 1..23: note = Synthetic
  source 1..23: mol_type = other RNA
gccaatcgaggcccgccggctgc

SEQ ID NO: 17923 - RNA, 24 nt, synthetic construct
  misc_feature 1..24: note = Synthetic
  source 1..24: mol_type = other RNA
tgccaatcgaggcccgccggctgc

SEQ ID NO: 17924 - RNA, 18 nt, synthetic construct
  misc_feature 1..18: note = Synthetic
  source 1..18: mol_type = other RNA
aattacgggtctaccatc

SEQ ID NO: 17925 - RNA, 19 nt, synthetic construct
  misc_feature 1..19: note = Synthetic
  source 1..19: mol_type = other RNA
caattacgggtctaccatc

SEQ ID NO: 17926 - RNA, 21 nt, synthetic construct
  misc_feature 1..21: note = Synthetic
  source 1..21: mol_type = other RNA
aacaattacgggtctaccatc

SEQ ID NO: 17927 - RNA, 22 nt, synthetic construct
  misc_feature 1..22: note = Synthetic
  source 1..22: mol_type = other RNA
aaacaattacgggtctaccatc

SEQ ID NO: 17928 - RNA, 23 nt, synthetic construct
  misc_feature 1..23: note = Synthetic
  source 1..23: mol_type = other RNA
aaaacaattacgggtctaccatc

SEQ ID NO: 17929 - RNA, 24 nt, synthetic construct
  misc_feature 1..24: note = Synthetic
  source 1..24: mol_type = other RNA
aaaaacaattacgggtctaccatc

SEQ ID NO: 17930 - RNA, 18 nt, synthetic construct
  misc_feature 1..18: note = Synthetic
  source 1..18: mol_type = other RNA
atgctgcgcgccacgatc

SEQ ID NO: 17931 - RNA, 19 nt, synthetic construct
  misc_feature 1..19: note = Synthetic
  source 1..19: mol_type = other RNA
aatgctgcgcgccacgatc

SEQ ID NO: 17932 - RNA, 21 nt, synthetic construct
  misc_feature 1..21: note = Synthetic
  source 1..21: mol_type = other RNA
gaaatgctgcgcgccacgatc

SEQ ID NO: 17933 - RNA, 22 nt, synthetic construct
  misc_feature 1..22: note = Synthetic
  source 1..22: mol_type = other RNA
agaaatgctgcgcgccacgatc

SEQ ID NO: 17934 - RNA, 23 nt, synthetic construct
  misc_feature 1..23: note = Synthetic
  source 1..23: mol_type = other RNA
gagaaatgctgcgcgccacgatc

SEQ ID NO: 17935 - RNA, 24 nt, synthetic construct
  misc_feature 1..24: note = Synthetic
  source 1..24: mol_type = other RNA
ggagaaatgctgcgcgccacgatc

SEQ ID NO: 17936 - RNA, 18 nt, synthetic construct
  misc_feature 1..18: note = Synthetic
  source 1..18: mol_type = other RNA
gagggcctgctcgatctc

SEQ ID NO: 17937 - RNA, 19 nt, synthetic construct
  misc_feature 1..19: note = Synthetic
  source 1..19: mol_type = other RNA
cgagggcctgctcgatctc

SEQ ID NO: 17938 - RNA, 21 nt, synthetic construct
  misc_feature 1..21: note = Synthetic
  source 1..21: mol_type = other RNA
atcgagggcctgctcgatctc

SEQ ID NO: 17939 - RNA, 22 nt, synthetic construct
  misc_feature 1..22: note = Synthetic
  source 1..22: mol_type = other RNA
catcgagggcctgctcgatctc

SEQ ID NO: 17940 - RNA, 23 nt, synthetic construct
  misc_feature 1..23: note = Synthetic
  source 1..23: mol_type = other RNA
ccatcgagggcctgctcgatctc

SEQ ID NO: 17941 - RNA, 24 nt, synthetic construct
  misc_feature 1..24: note = Synthetic
  source 1..24: mol_type = other RNA
accatcgagggcctgctcgatctc

SEQ ID NO: 17942 - RNA, 18 nt, synthetic construct
  misc_feature 1..18: note = Synthetic
  source 1..18: mol_type = other RNA
aacggagcgctcaccgtc

SEQ ID NO: 17943 - RNA, 19 nt, synthetic construct
  misc_feature 1..19: note = Synthetic
  source 1..19: mol_type = other RNA
caacggagcgctcaccgtc

SEQ ID NO: 17944 - RNA, 21 nt, synthetic construct
  misc_feature 1..21: note = Synthetic
  source 1..21: mol_type = other RNA
gtcaacggagcgctcaccgtc

SEQ ID NO: 17945 - RNA, 22 nt, synthetic construct
  misc_feature 1..22: note = Synthetic
  source 1..22: mol_type = other RNA
cgtcaacggagcgctcaccgtc

SEQ ID NO: 17946 - RNA, 23 nt, synthetic construct
  misc_feature 1..23: note = Synthetic
  source 1..23: mol_type = other RNA
tcgtcaacggagcgctcaccgtc

SEQ ID NO: 17947 - RNA, 24 nt, synthetic construct
  misc_feature 1..24: note = Synthetic
  source 1..24: mol_type = other RNA
ttcgtcaacggagcgctcaccgtc

SEQ ID NO: 17948 - RNA, 18 nt, synthetic construct
  misc_feature 1..18: note = Synthetic
  source 1..18: mol_type = other RNA
gggagctaaaccacattc

SEQ ID NO: 17949 - RNA, 19 nt, synthetic construct
  misc_feature 1..19: note = Synthetic
  source 1..19: mol_type = other RNA
cgggagctaaaccacattc

SEQ ID NO: 17950 - RNA, 21 nt, synthetic construct
  misc_feature 1..21: note = Synthetic
  source 1..21: mol_type = other RNA
tgcgggagctaaaccacattc

SEQ ID NO: 17951 - RNA, 22 nt, synthetic construct
  misc_feature 1..22: note = Synthetic
  source 1..22: mol_type = other RNA
ctgcgggagctaaaccacattc

SEQ ID NO: 17952 - RNA, 23 nt, synthetic construct
  misc_feature 1..23: note = Synthetic
  source 1..23: mol_type = other RNA
gctgcgggagctaaaccacattc

SEQ ID NO: 17953 - RNA, 24 nt, synthetic construct
  misc_feature 1..24: note = Synthetic
  source 1..24: mol_type = other RNA
ggctgcgggagctaaaccacattc

SEQ ID NO: 17954 - RNA, 18 nt, synthetic construct
  misc_feature 1..18: note = Synthetic
  source 1..18: mol_type = other RNA
gtgttgattcgggcgaag

SEQ ID NO: 17955 - RNA, 19 nt, synthetic construct
  misc_feature 1..19: note = Synthetic
  source 1..19: mol_type = other RNA
ggtgttgattcgggcgaag

SEQ ID NO: 17956 - RNA, 21 nt, synthetic construct
  misc_feature 1..21: note = Synthetic
  source 1..21: mol_type = other RNA
atggtgttgattcgggcgaag

SEQ ID NO: 17957 - RNA, 22 nt, synthetic construct
  misc_feature 1..22: note = Synthetic
  source 1..22: mol_type = other RNA
tatggtgttgattcgggcgaag

SEQ ID NO: 17958 - RNA, 23 nt, synthetic construct
  misc_feature 1..23: note = Synthetic
  source 1..23: mol_type = other RNA
ttatggtgttgattcgggcgaag

SEQ ID NO: 17959 - RNA, 24 nt, synthetic construct
  misc_feature 1..24: note = Synthetic
  source 1..24: mol_type = other RNA
tttatggtgttgattcgggcgaag

SEQ ID NO: 17960 - RNA, 18 nt, synthetic construct
  misc_feature 1..18: note = Synthetic
  source 1..18: mol_type = other RNA
gacgacgcccccgaagag

SEQ ID NO: 17961 - RNA, 19 nt, synthetic construct
  misc_feature 1..19: note = Synthetic
  source 1..19: mol_type = other RNA
cgacgacgcccccgaagag

SEQ ID NO: 17962 - RNA, 21 nt, synthetic construct
  misc_feature 1..21: note = Synthetic
  source 1..21: mol_type = other RNA
gacgacgacgcccccgaagag

SEQ ID NO: 17963 - RNA, 22 nt, synthetic construct
  misc_feature 1..22: note = Synthetic
  source 1..22: mol_type = other RNA
ggacgacgacgcccccgaagag

SEQ ID NO: 17964 - RNA, 23 nt, synthetic construct
  misc_feature 1..23: note = Synthetic
  source 1..23: mol_type = other RNA
cggacgacgacgcccccgaagag

SEQ ID NO: 17965 - RNA, 24 nt, synthetic construct
  misc_feature 1..24: note = Synthetic
  source 1..24: mol_type = other RNA
ccggacgacgacgcccccgaagag

SEQ ID NO: 17966 - RNA, 18 nt, synthetic construct
  misc_feature 1..18: note = Synthetic
  source 1..18: mol_type = other RNA
acgagctccacttagacg

SEQ ID NO: 17967 - RNA, 19 nt, synthetic construct
  misc_feature 1..19: note = Synthetic
  source 1..19: mol_type = other RNA
gacgagctccacttagacg

SEQ ID NO: 17968 - RNA, 21 nt, synthetic construct
  misc_feature 1..21: note = Synthetic
  source 1..21: mol_type = other RNA
gggacgagctccacttagacg

SEQ ID NO: 17969 - RNA, 22 nt, synthetic construct
  misc_feature 1..22: note = Synthetic
  source 1..22: mol_type = other RNA
ggggacgagctccacttagacg

SEQ ID NO: 17970 - RNA, 23 nt, synthetic construct
  misc_feature 1..23: note = Synthetic
  source 1..23: mol_type = other RNA
gggggacgagctccacttagacg

SEQ ID NO: 17971 - RNA, 24 nt, synthetic construct
  misc_feature 1..24: note = Synthetic
  source 1..24: mol_type = other RNA
tgggggacgagctccacttagacg

SEQ ID NO: 17972 - RNA, 18 nt, synthetic construct
  misc_feature 1..18: note = Synthetic
  source 1..18: mol_type = other RNA
gtgcgcagcgcggctacg

SEQ ID NO: 17973 - RNA, 19 nt, synthetic construct
  misc_feature 1..19: note = Synthetic
  source 1..19: mol_type = other RNA
ggtgcgcagcgcggctacg

SEQ ID NO: 17974 - RNA, 21 nt, synthetic construct
  misc_feature 1..21: note = Synthetic
  source 1..21: mol_type = other RNA
ctggtgcgcagcgcggctacg

SEQ ID NO: 17975 - RNA, 22 nt, synthetic construct
  misc_feature 1..22: note = Synthetic
  source 1..22: mol_type = other RNA
gctggtgcgcagcgcggctacg

SEQ ID NO: 17976 - RNA, 23 nt, synthetic construct
  misc_feature 1..23: note = Synthetic
  source 1..23: mol_type = other RNA
cgctggtgcgcagcgcggctacg

SEQ ID NO: 17977 - RNA, 24 nt, synthetic construct
  misc_feature 1..24: note = Synthetic
  source 1..24: mol_type = other RNA
ccgctggtgcgcagcgcggctacg

SEQ ID NO: 17978 - RNA, 18 nt, synthetic construct
  misc_feature 1..18: note = Synthetic
  source 1..18: mol_type = other RNA
tcctatgggccgcgtacg

SEQ ID NO: 17979 - RNA, 19 nt, synthetic construct
  misc_feature 1..19: note = Synthetic
  source 1..19: mol_type = other RNA
atcctatgggccgcgtacg

SEQ ID NO: 17980 - RNA, 21 nt, synthetic construct
  misc_feature 1..21: note = Synthetic
  source 1..21: mol_type = other RNA
agatcctatgggccgcgtacg

SEQ ID NO: 17981 - RNA, 22 nt, synthetic construct
  misc_feature 1..22: note = Synthetic
  source 1..22: mol_type = other RNA
gagatcctatgggccgcgtacg

SEQ ID NO: 17982 - RNA, 23 nt, synthetic construct
  misc_feature 1..23: note = Synthetic
  source 1..23: mol_type = other RNA
cgagatcctatgggccgcgtacg

SEQ ID NO: 17983 - RNA, 24 nt, synthetic construct
  misc_feature 1..24: note = Synthetic
  source 1..24: mol_type = other RNA
gcgagatcctatgggccgcgtacg

SEQ ID NO: 17984 - RNA, 18 nt, synthetic construct
  misc_feature 1..18: note = Synthetic
  source 1..18: mol_type = other RNA
cggacgacgacgcccccg

SEQ ID NO: 17985 - RNA, 19 nt, synthetic construct
  misc_feature 1..19: note = Synthetic
  source 1..19: mol_type = other RNA
ccggacgacgacgcccccg

SEQ ID NO: 17986 - RNA, 21 nt, synthetic construct
  misc_feature 1..21: note = Synthetic
  source 1..21: mol_type = other RNA
tcccggacgacgacgcccccg

SEQ ID NO: 17987 - RNA, 22 nt, synthetic construct
  misc_feature 1..22: note = Synthetic
  source 1..22: mol_type = other RNA
ctcccggacgacgacgcccccg

SEQ ID NO: 17988 - RNA, 23 nt, synthetic construct
  misc_feature 1..23: note = Synthetic
  source 1..23: mol_type = other RNA
tctcccggacgacgacgcccccg

SEQ ID NO: 17989 - RNA, 24 nt, synthetic construct
  misc_feature 1..24: note = Synthetic
  source 1..24: mol_type = other RNA
atctcccggacgacgacgcccccg

SEQ ID NO: 17990 - RNA, 18 nt, synthetic construct
  misc_feature 1..18: note = Synthetic
  source 1..18: mol_type = other RNA
gcctgtcctttctccccg

SEQ ID NO: 17991 - RNA, 19 nt, synthetic construct
  misc_feature 1..19: note = Synthetic
  source 1..19: mol_type = other RNA
cgcctgtcctttctccccg

SEQ ID NO: 17992 - RNA, 21 nt, synthetic construct
  misc_feature 1..21: note = Synthetic
  source 1..21: mol_type = other RNA
cgcgcctgtcctttctccccg

SEQ ID NO: 17993 - RNA, 22 nt, synthetic construct
  misc_feature 1..22: note = Synthetic
  source 1..22: mol_type = other RNA
ccgcgcctgtcctttctccccg

SEQ ID NO: 17994 - RNA, 23 nt, synthetic construct
  misc_feature 1..23: note = Synthetic
  source 1..23: mol_type = other RNA
tccgcgcctgtcctttctccccg

SEQ ID NO: 17995 - RNA, 24 nt, synthetic construct
  misc_feature 1..24: note = Synthetic
  source 1..24: mol_type = other RNA
ctccgcgcctgtcctttctccccg

SEQ ID NO: 17996 - RNA, 18 nt, synthetic construct
  misc_feature 1..18: note = Synthetic
  source 1..18: mol_type = other RNA
acgacgcccccgaagagg

SEQ ID NO: 17997 - RNA, 19 nt, synthetic construct
  misc_feature 1..19: note = Synthetic
  source 1..19: mol_type = other RNA
gacgacgcccccgaagagg

SEQ ID NO: 17998 - RNA, 21 nt, synthetic construct
  misc_feature 1..21: note = Synthetic
  source 1..21: mol_type = other RNA
acgacgacgcccccgaagagg

SEQ ID NO: 17999 - RNA, 22 nt, synthetic construct
  misc_feature 1..22: note = Synthetic
  source 1..22: mol_type = other RNA
gacgacgacgcccccgaagagg

SEQ ID NO: 18000 - RNA, 23 nt, synthetic construct
  misc_feature 1..23: note = Synthetic
  source 1..23: mol_type = other RNA
ggacgacgacgcccccgaagagg

SEQ ID NO: 18001 - RNA, 24 nt, synthetic construct
  misc_feature 1..24: note = Synthetic
  source 1..24: mol_type = other RNA
cggacgacgacgcccccgaagagg

SEQ ID NO: 18002 - RNA, 18 nt, synthetic construct
  misc_feature 1..18: note = Synthetic
  source 1..18: mol_type = other RNA
tgcgcagcgcggctacgg

SEQ ID NO: 18003 - RNA, 19 nt, synthetic construct
  misc_feature 1..19: note = Synthetic
  source 1..19: mol_type = other RNA
gtgcgcagcgcggctacgg

SEQ ID NO: 18004 - RNA, 21 nt, synthetic construct
  misc_feature 1..21: note = Synthetic
  source 1..21: mol_type = other RNA
tggtgcgcagcgcggctacgg

SEQ ID NO: 18005 - RNA, 22 nt, synthetic construct
  misc_feature 1..22: note = Synthetic
  source 1..22: mol_type = other RNA
ctggtgcgcagcgcggctacgg

SEQ ID NO: 18006 - RNA, 23 nt, synthetic construct
  misc_feature 1..23: note = Synthetic
  source 1..23: mol_type = other RNA
gctggtgcgcagcgcggctacgg

SEQ ID NO: 18007 - RNA, 24 nt, synthetic construct
  misc_feature 1..24: note = Synthetic
  source 1..24: mol_type = other RNA
cgctggtgcgcagcgcggctacgg

SEQ ID NO: 18008 - RNA, 18 nt, synthetic construct
  misc_feature 1..18: note = Synthetic
  source 1..18: mol_type = other RNA
tttatggtgttgattcgg

SEQ ID NO: 18009 - RNA, 19 nt, synthetic construct
  misc_feature 1..19: note = Synthetic
  source 1..19: mol_type = other RNA
ctttatggtgttgattcgg

SEQ ID NO: 18010 - RNA, 21 nt, synthetic construct
  misc_feature 1..21: note = Synthetic
  source 1..21: mol_type = other RNA
tactttatggtgttgattcgg

SEQ ID NO: 18011 - RNA, 22 nt, synthetic construct
  misc_feature 1..22: note = Synthetic
  source 1..22: mol_type = other RNA
gtactttatggtgttgattcgg

SEQ ID NO: 18012 - RNA, 23 nt, synthetic construct
  misc_feature 1..23: note = Synthetic
  source 1..23: mol_type = other RNA
ggtactttatggtgttgattcgg

SEQ ID NO: 18013 - RNA, 24 nt, synthetic construct
  misc_feature 1..24: note = Synthetic
  source 1..24: mol_type = other RNA
gggtactttatggtgttgattcgg

SEQ ID NO: 18014 - RNA, 18 nt, synthetic construct
  misc_feature 1..18: note = Synthetic
  source 1..18: mol_type = other RNA
gacggggattccccgggg

SEQ ID NO: 18015 - RNA, 19 nt, synthetic construct
  misc_feature 1..19: note = Synthetic
  source 1..19: mol_type = other RNA
ggacggggattccccgggg

SEQ ID NO: 18016 - RNA, 21 nt, synthetic construct
  misc_feature 1..21: note = Synthetic
  source 1..21: mol_type = other RNA
ggggacggggattccccgggg

SEQ ID NO: 18017 - RNA, 22 nt, synthetic construct
  misc_feature 1..22: note = Synthetic
  source 1..22: mol_type = other RNA
gggggacggggattccccgggg

SEQ ID NO: 18018 - RNA, 23 nt, synthetic construct
  misc_feature 1..23: note = Synthetic
  source 1..23: mol_type = other RNA
tgggggacggggattccccgggg

SEQ ID NO: 18019 - RNA, 24 nt, synthetic construct
  misc_feature 1..24: note = Synthetic
  source 1..24: mol_type = other RNA
ttgggggacggggattccccgggg

SEQ ID NO: 18020 - RNA, 18 nt, synthetic construct
  misc_feature 1..18: note = Synthetic
  source 1..18: mol_type = other RNA
ccgatgtcagcctggggg

SEQ ID NO: 18021 - RNA, 19 nt, synthetic construct
  misc_feature 1..19: note = Synthetic
  source 1..19: mol_type = other RNA
accgatgtcagcctggggg

SEQ ID NO: 18022 - RNA, 21 nt, synthetic construct
  misc_feature 1..21: note = Synthetic
  source 1..21: mol_type = other RNA
cgaccgatgtcagcctggggg

SEQ ID NO: 18023 - RNA, 22 nt, synthetic construct
  misc_feature 1..22: note = Synthetic
  source 1..22: mol_type = other RNA
ccgaccgatgtcagcctggggg

SEQ ID NO: 18024 - RNA, 23 nt, synthetic construct
  misc_feature 1..23: note = Synthetic
  source 1..23: mol_type = other RNA
cccgaccgatgtcagcctggggg

SEQ ID NO: 18025 - RNA, 24 nt, synthetic construct
  misc_feature 1..24: note = Synthetic
  source 1..24: mol_type = other RNA
ccccgaccgatgtcagcctggggg

SEQ ID NO: 18026 - RNA, 18 nt, synthetic construct
  misc_feature 1..18: note = Synthetic
  source 1..18: mol_type = other RNA
atctggacatgttggggg

SEQ ID NO: 18027 - RNA, 19 nt, synthetic construct
  misc_feature 1..19: note = Synthetic
  source 1..19: mol_type = other RNA
gatctggacatgttggggg

SEQ ID NO: 18028 - RNA, 21 nt, synthetic construct
  misc_feature 1..21: note = Synthetic
  source 1..21: mol_type = other RNA
tcgatctggacatgttggggg

SEQ ID NO: 18029 - RNA, 22 nt, synthetic construct
  misc_feature 1..22: note = Synthetic
  source 1..22: mol_type = other RNA
ttcgatctggacatgttggggg

SEQ ID NO: 18030 - RNA, 23 nt, synthetic construct
  misc_feature 1..23: note = Synthetic
  source 1..23: mol_type = other RNA
tttcgatctggacatgttggggg

SEQ ID NO: 18031 - RNA, 24 nt, synthetic construct
  misc_feature 1..24: note = Synthetic
  source 1..24: mol_type = other RNA
atttcgatctggacatgttggggg

SEQ ID NO: 18032 - RNA, 18 nt, synthetic construct
  misc_feature 1..18: note = Synthetic
  source 1..18: mol_type = other RNA
attgacgagtacggtggg

SEQ ID NO: 18033 - RNA, 19 nt, synthetic construct
  misc_feature 1..19: note = Synthetic
  source 1..19: mol_type = other RNA
aattgacgagtacggtggg

SEQ ID NO: 18034 - RNA, 20 nt, synthetic construct
  misc_feature 1..20: note = Synthetic
  source 1..20: mol_type = other RNA
gaattgacgagtacggtggg

SEQ ID NO: 18035 - RNA, 21 nt, synthetic construct
  misc_feature 1..21: note = Synthetic
  source 1..21: mol_type = other RNA
ggaattgacgagtacggtggg

SEQ ID NO: 18036 - RNA, 22 nt, synthetic construct
  misc_feature 1..22: note = Synthetic
  source 1..22: mol_type = other RNA
tggaattgacgagtacggtggg

SEQ ID NO: 18037 - RNA, 23 nt, synthetic construct
  misc_feature 1..23: note = Synthetic
  source 1..23: mol_type = other RNA
ttggaattgacgagtacggtggg

SEQ ID NO: 18038 - RNA, 24 nt, synthetic construct
  misc_feature 1..24: note = Synthetic
  source 1..24: mol_type = other RNA
cttggaattgacgagtacggtggg

SEQ ID NO: 18039 - RNA, 18 nt, synthetic construct
  misc_feature 1..18: note = Synthetic
  source 1..18: mol_type = other RNA
gacgcgatcgcgacctgg

SEQ ID NO: 18040 - RNA, 19 nt, synthetic construct
  misc_feature 1..19: note = Synthetic
  source 1..19: mol_type = other RNA
ggacgcgatcgcgacctgg

SEQ ID NO: 18041 - RNA, 21 nt, synthetic construct
  misc_feature 1..21: note = Synthetic
  source 1..21: mol_type = other RNA
gcggacgcgatcgcgacctgg

SEQ ID NO: 18042 - RNA, 22 nt, synthetic construct
  misc_feature 1..22: note = Synthetic
  source 1..22: mol_type = other RNA
cgcggacgcgatcgcgacctgg

SEQ ID NO: 18043 - RNA, 23 nt, synthetic construct
  misc_feature 1..23: note = Synthetic
  source 1..23: mol_type = other RNA
gcgcggacgcgatcgcgacctgg

SEQ ID NO: 18044 - RNA, 24 nt, synthetic construct
  misc_feature 1..24: note = Synthetic
  source 1..24: mol_type = other RNA
tgcgcggacgcgatcgcgacctgg

SEQ ID NO: 18045 - RNA, 18 nt, synthetic construct
  misc_feature 1..18: note = Synthetic
  source 1..18: mol_type = other RNA
gatttcgatctggacatg

SEQ ID NO: 18046 - RNA, 19 nt, synthetic construct
  misc_feature 1..19: note = Synthetic
  source 1..19: mol_type = other RNA
cgatttcgatctggacatg

SEQ ID NO: 18047 - RNA, 21 nt, synthetic construct
  misc_feature 1..21: note = Synthetic
  source 1..21: mol_type = other RNA
gacgatttcgatctggacatg

SEQ ID NO: 18048 - RNA, 22 nt, synthetic construct
  misc_feature 1..22: note = Synthetic
  source 1..22: mol_type = other RNA
agacgatttcgatctggacatg

SEQ ID NO: 18049 - RNA, 23 nt, synthetic construct
  misc_feature 1..23: note = Synthetic
  source 1..23: mol_type = other RNA
tagacgatttcgatctggacatg

SEQ ID NO: 18050 - RNA, 24 nt, synthetic construct
  misc_feature 1..24: note = Synthetic
  source 1..24: mol_type = other RNA
ctagacgatttcgatctggacatg

SEQ ID NO: 18051 - RNA, 18 nt, synthetic construct
  misc_feature 1..18: note = Synthetic
  source 1..18: mol_type = other RNA
ccctccgaggcggtcatg

SEQ ID NO: 18052 - RNA, 19 nt, synthetic construct
  misc_feature 1..19: note = Synthetic
  source 1..19: mol_type = other RNA
gccctccgaggcggtcatg

SEQ ID NO: 18053 - RNA, 21 nt, synthetic construct
  misc_feature 1..21: note = Synthetic
  source 1..21: mol_type = other RNA
tcgccctccgaggcggtcatg

SEQ ID NO: 18054 - RNA, 22 nt, synthetic construct
  misc_feature 1..22: note = Synthetic
  source 1..22: mol_type = other RNA
ctcgccctccgaggcggtcatg

SEQ ID NO: 18055 - RNA, 23 nt, synthetic construct
  misc_feature 1..23: note = Synthetic
  source 1..23: mol_type = other RNA
cctcgccctccgaggcggtcatg

SEQ ID NO: 18056 - RNA, 24 nt, synthetic construct
  misc_feature 1..24: note = Synthetic
  source 1..24: mol_type = other RNA
acctcgccctccgaggcggtcatg

SEQ ID NO: 18057 - RNA, 18 nt, synthetic construct
  misc_feature 1..18: note = Synthetic
  source 1..18: mol_type = other RNA
tgcctctgttgcgacctg

SEQ ID NO: 18058 - RNA, 19 nt, synthetic construct
  misc_feature 1..19: note = Synthetic
  source 1..19: mol_type = other RNA
ctgcctctgttgcgacctg

SEQ ID NO: 18059 - RNA, 21 nt, synthetic construct
  misc_feature 1..21: note = Synthetic
  source 1..21: mol_type = other RNA
gactgcctctgttgcgacctg

SEQ ID NO: 18060 - RNA, 22 nt, synthetic construct
  misc_feature 1..22: note = Synthetic
  source 1..22: mol_type = other RNA
tgactgcctctgttgcgacctg

SEQ ID NO: 18061 - RNA, 23 nt, synthetic construct
  misc_feature 1..23: note = Synthetic
  source 1..23: mol_type = other RNA
ttgactgcctctgttgcgacctg

SEQ ID NO: 18062 - RNA, 24 nt, synthetic construct
  misc_feature 1..24: note = Synthetic
  source 1..24: mol_type = other RNA
tttgactgcctctgttgcgacctg

SEQ ID NO: 18063 - RNA, 18 nt, synthetic construct
  misc_feature 1..18: note = Synthetic
  source 1..18: mol_type = other RNA
ccgaccgatgtcagcctg

SEQ ID NO: 18064 - RNA, 19 nt, synthetic construct
  misc_feature 1..19: note = Synthetic
  source 1..19: mol_type = other RNA
cccgaccgatgtcagcctg

SEQ ID NO: 18065 - RNA, 21 nt, synthetic construct
  misc_feature 1..21: note = Synthetic
  source 1..21: mol_type = other RNA
cccccgaccgatgtcagcctg

SEQ ID NO: 18066 - RNA, 22 nt, synthetic construct
  misc_feature 1..22: note = Synthetic
  source 1..22: mol_type = other RNA
ccccccgaccgatgtcagcctg

SEQ ID NO: 18067 - RNA, 23 nt, synthetic construct
  misc_feature 1..23: note = Synthetic
  source 1..23: mol_type = other RNA
cccccccgaccgatgtcagcctg

SEQ ID NO: 18068 - RNA, 24 nt, synthetic construct
  misc_feature 1..24: note = Synthetic
  source 1..24: mol_type = other RNA
gcccccccgaccgatgtcagcctg

SEQ ID NO: 18069 - RNA, 18 nt, synthetic construct
  misc_feature 1..18: note = Synthetic
  source 1..18: mol_type = other RNA
atcgaggcccgccggctg

SEQ ID NO: 18070 - RNA, 19 nt, synthetic construct
  misc_feature 1..19: note = Synthetic
  source 1..19: mol_type = other RNA
aatcgaggcccgccggctg

SEQ ID NO: 18071 - RNA, 21 nt, synthetic construct
  misc_feature 1..21: note = Synthetic
  source 1..21: mol_type = other RNA
ccaatcgaggcccgccggctg

SEQ ID NO: 18072 - RNA, 22 nt, synthetic construct
  misc_feature 1..22: note = Synthetic
  source 1..22: mol_type = other RNA
gccaatcgaggcccgccggctg

SEQ ID NO: 18073 - RNA, 23 nt, synthetic construct
  misc_feature 1..23: note = Synthetic
  source 1..23: mol_type = other RNA
tgccaatcgaggcccgccggctg

SEQ ID NO: 18074 - RNA, 24 nt, synthetic construct
  misc_feature 1..24: note = Synthetic
  source 1..24: mol_type = other RNA
gtgccaatcgaggcccgccggctg

SEQ ID NO: 18075 - RNA, 18 nt, synthetic construct
  misc_feature 1..18: note = Synthetic
  source 1..18: mol_type = other RNA
ttcgatctggacatgttg

SEQ ID NO: 18076 - RNA, 19 nt, synthetic construct
  misc_feature 1..19: note = Synthetic
  source 1..19: mol_type = other RNA
tttcgatctggacatgttg

SEQ ID NO: 18077 - RNA, 21 nt, synthetic construct
  misc_feature 1..21: note = Synthetic
  source 1..21: mol_type = other RNA
gatttcgatctggacatgttg

SEQ ID NO: 18078 - RNA, 22 nt, synthetic construct
  misc_feature 1..22: note = Synthetic
  source 1..22: mol_type = other RNA
cgatttcgatctggacatgttg

SEQ ID NO: 18079 - RNA, 23 nt, synthetic construct
  misc_feature 1..23: note = Synthetic
  source 1..23: mol_type = other RNA
acgatttcgatctggacatgttg

SEQ ID NO: 18080 - RNA, 24 nt, synthetic construct
  misc_feature 1..24: note = Synthetic
  source 1..24: mol_type = other RNA
gacgatttcgatctggacatgttg

SEQ ID NO: 18081 - RNA, 18 nt, synthetic construct
  misc_feature 1..18: note = Synthetic
  source 1..18: mol_type = other RNA
gccctccgaggcggtcat

SEQ ID NO: 18082 - RNA, 19 nt, synthetic construct
  misc_feature 1..19: note = Synthetic
  source 1..19: mol_type = other RNA
cgccctccgaggcggtcat

SEQ ID NO: 18083 - RNA, 21 nt, synthetic construct
  misc_feature 1..21: note = Synthetic
  source 1..21: mol_type = other RNA
ctcgccctccgaggcggtcat

SEQ ID NO: 18084 - RNA, 22 nt, synthetic construct
  misc_feature 1..22: note = Synthetic
  source 1..22: mol_type = other RNA
cctcgccctccgaggcggtcat

SEQ ID NO: 18085 - RNA, 23 nt, synthetic construct
  misc_feature 1..23: note = Synthetic
  source 1..23: mol_type = other RNA
acctcgccctccgaggcggtcat

SEQ ID NO: 18086 - RNA, 24 nt, synthetic construct
  misc_feature 1..24: note = Synthetic
  source 1..24: mol_type = other RNA
gacctcgccctccgaggcggtcat

SEQ ID NO: 18087 - RNA, 18 nt, synthetic construct
  misc_feature 1..18: note = Synthetic
  source 1..18: mol_type = other RNA
gcgctagacgatttcgat

SEQ ID NO: 18088 - RNA, 19 nt, synthetic construct
  misc_feature 1..19: note = Synthetic
  source 1..19: mol_type = other RNA
cgcgctagacgatttcgat

SEQ ID NO: 18089 - RNA, 21 nt, synthetic construct
  misc_feature 1..21: note = Synthetic
  source 1..21: mol_type = other RNA
gacgcgctagacgatttcgat

SEQ ID NO: 18090 - RNA, 22 nt, synthetic construct
  misc_feature 1..22: note = Synthetic
  source 1..22: mol_type = other RNA
cgacgcgctagacgatttcgat

SEQ ID NO: 18091 - RNA, 23 nt, synthetic construct
  misc_feature 1..23: note = Synthetic
  source 1..23: mol_type = other RNA
ccgacgcgctagacgatttcgat

SEQ ID NO: 18092 - RNA, 24 nt, synthetic construct
  misc_feature 1..24: note = Synthetic
  source 1..24: mol_type = other RNA
gccgacgcgctagacgatttcgat

SEQ ID NO: 18093 - RNA, 18 nt, synthetic construct
  misc_feature 1..18: note = Synthetic
  source 1..18: mol_type = other RNA
gtactttatggtgttgat

SEQ ID NO: 18094 - RNA, 19 nt, synthetic construct
  misc_feature 1..19: note = Synthetic
  source 1..19: mol_type = other RNA
ggtactttatggtgttgat

SEQ ID NO: 18095 - RNA, 21 nt, synthetic construct
  misc_feature 1..21: note = Synthetic
  source 1..21: mol_type = other RNA
tgggtactttatggtgttgat

SEQ ID NO: 18096 - RNA, 22 nt, synthetic construct
  misc_feature 1..22: note = Synthetic
  source 1..22: mol_type = other RNA
ctgggtactttatggtgttgat

SEQ ID NO: 18097 - RNA, 23 nt, synthetic construct
  misc_feature 1..23: note = Synthetic
  source 1..23: mol_type = other RNA
tctgggtactttatggtgttgat

SEQ ID NO: 18098 - RNA, 24 nt, synthetic construct
  misc_feature 1..24: note = Synthetic
  source 1..24: mol_type = other RNA
ctctgggtactttatggtgttgat

SEQ ID NO: 18099 - RNA, 18 nt, synthetic construct
  misc_feature 1..18: note = Synthetic
  source 1..18: mol_type = other RNA
cggacgcgatcgcgacct

SEQ ID NO: 18100 - RNA, 19 nt, synthetic construct
  misc_feature 1..19: note = Synthetic
  source 1..19: mol_type = other RNA
gcggacgcgatcgcgacct

SEQ ID NO: 18101 - RNA, 21 nt, synthetic construct
  misc_feature 1..21: note = Synthetic
  source 1..21: mol_type = other RNA
gcgcggacgcgatcgcgacct

SEQ ID NO: 18102 - RNA, 22 nt, synthetic construct
  misc_feature 1..22: note = Synthetic
  source 1..22: mol_type = other RNA
tgcgcggacgcgatcgcgacct

SEQ ID NO: 18103 - RNA, 23 nt, synthetic construct
  misc_feature 1..23: note = Synthetic
  source 1..23: mol_type = other RNA
atgcgcggacgcgatcgcgacct

SEQ ID NO: 18104 - RNA, 24 nt, synthetic construct
  misc_feature 1..24: note = Synthetic
  source 1..24: mol_type = other RNA
catgcgcggacgcgatcgcgacct

SEQ ID NO: 18105 - RNA, 18 nt, synthetic construct
  misc_feature 1..18: note = Synthetic
  source 1..18: mol_type = other RNA
gcttcacgacctcgccct

SEQ ID NO: 18106 - RNA, 19 nt, synthetic construct
  misc_feature 1..19: note = Synthetic
  source 1..19: mol_type = other RNA
agcttcacgacctcgccct

SEQ ID NO: 18107 - RNA, 21 nt, synthetic construct
  misc_feature 1..21: note = Synthetic
  source 1..21: mol_type = other RNA
ccagcttcacgacctcgccct

SEQ ID NO: 18108 - RNA, 22 nt, synthetic construct
  misc_feature 1..22: note = Synthetic
  source 1..22: mol_type = other RNA
tccagcttcacgacctcgccct

SEQ ID NO: 18109 - RNA, 23 nt, synthetic construct
  misc_feature 1..23: note = Synthetic
  source 1..23: mol_type = other RNA
ttccagcttcacgacctcgccct

SEQ ID NO: 18110 - RNA, 24 nt, synthetic construct
  misc_feature 1..24: note = Synthetic
  source 1..24: mol_type = other RNA
attccagcttcacgacctcgccct

SEQ ID NO: 18111 - RNA, 18 nt, synthetic construct
  misc_feature 1..18: note = Synthetic
  source 1..18: mol_type = other RNA
cccgaccgatgtcagcct

SEQ ID NO: 18112 - RNA, 19 nt, synthetic construct
  misc_feature 1..19: note = Synthetic
  source 1..19: mol_type = other RNA
ccccgaccgatgtcagcct

SEQ ID NO: 18113 - RNA, 21 nt, synthetic construct
  misc_feature 1..21: note = Synthetic
  source 1..21: mol_type = other RNA
ccccccgaccgatgtcagcct

SEQ ID NO: 18114 - RNA, 22 nt, synthetic construct
  misc_feature 1..22: note = Synthetic
  source 1..22: mol_type = other RNA
cccccccgaccgatgtcagcct

SEQ ID NO: 18115 - RNA, 23 nt, synthetic construct
  misc_feature 1..23: note = Synthetic
  source 1..23: mol_type = other RNA
gcccccccgaccgatgtcagcct

SEQ ID NO: 18116 - RNA, 24 nt, synthetic construct
  misc_feature 1..24: note = Synthetic
  source 1..24: mol_type = other RNA
ggcccccccgaccgatgtcagcct

SEQ ID NO: 18117 - RNA, 18 nt, synthetic construct
  misc_feature 1..18: note = Synthetic
  source 1..18: mol_type = other RNA
tttgacccgcgagatcct

SEQ ID NO: 18118 - RNA, 19 nt, synthetic construct
  misc_feature 1..19: note = Synthetic
  source 1..19: mol_type = other RNA
ttttgacccgcgagatcct

SEQ ID NO: 18119 - RNA, 21 nt, synthetic construct
  misc_feature 1..21: note = Synthetic
  source 1..21: mol_type = other RNA
atttttgacccgcgagatcct

SEQ ID NO: 18120 - RNA, 22 nt, synthetic construct
  misc_feature 1..22: note = Synthetic
  source 1..22: mol_type = other RNA
tatttttgacccgcgagatcct

SEQ ID NO: 18121 - RNA, 23 nt, synthetic construct
  misc_feature 1..23: note = Synthetic
  source 1..23: mol_type = other RNA
ctatttttgacccgcgagatcct

SEQ ID NO: 18122 - RNA, 24 nt, synthetic construct
  misc_feature 1..24: note = Synthetic
  source 1..24: mol_type = other RNA
tctatttttgacccgcgagatcct

SEQ ID NO: 18123 - RNA, 18 nt, synthetic construct
  misc_feature 1..18: note = Synthetic
  source 1..18: mol_type = other RNA
aatcgaggcccgccggct

SEQ ID NO: 18124 - RNA, 19 nt, synthetic construct
  misc_feature 1..19: note = Synthetic
  source 1..19: mol_type = other RNA
caatcgaggcccgccggct

SEQ ID NO: 18125 - RNA, 21 nt, synthetic construct
  misc_feature 1..21: note = Synthetic
  source 1..21: mol_type = other RNA
gccaatcgaggcccgccggct

SEQ ID NO: 18126 - RNA, 22 nt, synthetic construct
  misc_feature 1..22: note = Synthetic
  source 1..22: mol_type = other RNA
tgccaatcgaggcccgccggct

SEQ ID NO: 18127 - RNA, 23 nt, synthetic construct
  misc_feature 1..23: note = Synthetic
  source 1..23: mol_type = other RNA
gtgccaatcgaggcccgccggct

SEQ ID NO: 18128 - RNA, 24 nt, synthetic construct
  misc_feature 1..24: note = Synthetic
  source 1..24: mol_type = other RNA
agtgccaatcgaggcccgccggct

SEQ ID NO: 18129 - RNA, 18 nt, synthetic construct
  misc_feature 1..18: note = Synthetic
  source 1..18: mol_type = other RNA
ctggtgcgcagcgcggct

SEQ ID NO: 18130 - RNA, 19 nt, synthetic construct
  misc_feature 1..19: note = Synthetic
  source 1..19: mol_type = other RNA
gctggtgcgcagcgcggct

SEQ ID NO: 18131 - RNA, 21 nt, synthetic construct
  misc_feature 1..21: note = Synthetic
  source 1..21: mol_type = other RNA
ccgctggtgcgcagcgcggct

SEQ ID NO: 18132 - RNA, 22 nt, synthetic construct
  misc_feature 1..22: note = Synthetic
  source 1..22: mol_type = other RNA
cccgctggtgcgcagcgcggct

SEQ ID NO: 18133 - RNA, 23 nt, synthetic construct
  misc_feature 1..23: note = Synthetic
  source 1..23: mol_type = other RNA
tcccgctggtgcgcagcgcggct

SEQ ID NO: 18134 - RNA, 24 nt, synthetic construct
  misc_feature 1..24: note = Synthetic
  source 1..24: mol_type = other RNA
ctcccgctggtgcgcagcgcggct

SEQ ID NO: 18135 - RNA, 18 nt, synthetic construct
  misc_feature 1..18: note = Synthetic
  source 1..18: mol_type = other RNA
atatggccgacttcgagt

SEQ ID NO: 18136 - RNA, 19 nt, synthetic construct
  misc_feature 1..19: note = Synthetic
  source 1..19: mol_type = other RNA
gatatggccgacttcgagt

SEQ ID NO: 18137 - RNA, 21 nt, synthetic construct
  misc_feature 1..21: note = Synthetic
  source 1..21: mol_type = other RNA
tggatatggccgacttcgagt

SEQ ID NO: 18138 - RNA, 22 nt, synthetic construct
  misc_feature 1..22: note = Synthetic
  source 1..22: mol_type = other RNA
ctggatatggccgacttcgagt

SEQ ID NO: 18139 - RNA, 23 nt, synthetic construct
  misc_feature 1..23: note = Synthetic
  source 1..23: mol_type = other RNA
tctggatatggccgacttcgagt

SEQ ID NO: 18140 - RNA, 24 nt, synthetic construct
  misc_feature 1..24: note = Synthetic
  source 1..24: mol_type = other RNA
ctctggatatggccgacttcgagt

SEQ ID NO: 18141 - RNA, 18 nt, synthetic construct
  misc_feature 1..18: note = Synthetic
  source 1..18: mol_type = other RNA
caacggagcgctcaccgt

SEQ ID NO: 18142 - RNA, 19 nt, synthetic construct
  misc_feature 1..19: note = Synthetic
  source 1..19: mol_type = other RNA
tcaacggagcgctcaccgt

SEQ ID NO: 18143 - RNA, 21 nt, synthetic construct
  misc_feature 1..21: note = Synthetic
  source 1..21: mol_type = other RNA
cgtcaacggagcgctcaccgt

SEQ ID NO: 18144 - RNA, 22 nt, synthetic construct
  misc_feature 1..22: note = Synthetic
  source 1..22: mol_type = other RNA
tcgtcaacggagcgctcaccgt

SEQ ID NO: 18145 - RNA, 23 nt, synthetic construct
  misc_feature 1..23: note = Synthetic
  source 1..23: mol_type = other RNA
ttcgtcaacggagcgctcaccgt

SEQ ID NO: 18146 - RNA, 24 nt, synthetic construct
  misc_feature 1..24: note = Synthetic
  source 1..24: mol_type = other RNA
gttcgtcaacggagcgctcaccgt

SEQ ID NO: 18147 - RNA, 18 nt, synthetic construct
  misc_feature 1..18: note = Synthetic
  source 1..18: mol_type = other RNA
gcgtacagccgcgcgcgt

SEQ ID NO: 18148 - RNA, 19 nt, synthetic construct
  misc_feature 1..19: note = Synthetic
  source 1..19: mol_type = other RNA
cgcgtacagccgcgcgcgt

SEQ ID NO: 18149 - RNA, 21 nt, synthetic construct
  misc_feature 1..21: note = Synthetic
  source 1..21: mol_type = other RNA
cacgcgtacagccgcgcgcgt

SEQ ID NO: 18150 - RNA, 22 nt, synthetic construct
  misc_feature 1..22: note = Synthetic
  source 1..22: mol_type = other RNA
acacgcgtacagccgcgcgcgt

SEQ ID NO: 18151 - RNA, 23 nt, synthetic construct
  misc_feature 1..23: note = Synthetic
  source 1..23: mol_type = other RNA
aacacgcgtacagccgcgcgcgt

SEQ ID NO: 18152 - RNA, 24 nt, synthetic construct
  misc_feature 1..24: note = Synthetic
  source 1..24: mol_type = other RNA
gaacacgcgtacagccgcgcgcgt

SEQ ID NO: 18153 - RNA, 18 nt, synthetic construct
  misc_feature 1..18: note = Synthetic
  source 1..18: mol_type = other RNA
ttgacgagtacggtgggt

SEQ ID NO: 18154 - RNA, 19 nt, synthetic construct
  misc_feature 1..19: note = Synthetic
  source 1..19: mol_type = other RNA
attgacgagtacggtgggt

SEQ ID NO: 18155 - RNA, 21 nt, synthetic construct
  misc_feature 1..21: note = Synthetic
  source 1..21: mol_type = other RNA
gaattgacgagtacggtgggt

SEQ ID NO: 18156 - RNA, 22 nt, synthetic construct
  misc_feature 1..22: note = Synthetic
  source 1..22: mol_type = other RNA
ggaattgacgagtacggtgggt

SEQ ID NO: 18157 - RNA, 23 nt, synthetic construct
  misc_feature 1..23: note = Synthetic
  source 1..23: mol_type = other RNA
tggaattgacgagtacggtgggt

SEQ ID NO: 18158 - RNA, 24 nt, synthetic construct
  misc_feature 1..24: note = Synthetic
  source 1..24: mol_type = other RNA
ttggaattgacgagtacggtgggt

SEQ ID NO: 18159 - RNA, 18 nt, synthetic construct
  misc_feature 1..18: note = Synthetic
  source 1..18: mol_type = other RNA
atttcgatctggacatgt

SEQ ID NO: 18160 - RNA, 19 nt, synthetic construct
  misc_feature 1..19: note = Synthetic
  source 1..19: mol_type = other RNA
gatttcgatctggacatgt

SEQ ID NO: 18161 - RNA, 21 nt, synthetic construct
  misc_feature 1..21: note = Synthetic
  source 1..21: mol_type = other RNA
acgatttcgatctggacatgt

SEQ ID NO: 18162 - RNA, 22 nt, synthetic construct
  misc_feature 1..22: note = Synthetic
  source 1..22: mol_type = other RNA
gacgatttcgatctggacatgt

SEQ ID NO: 18163 - RNA, 23 nt, synthetic construct
  misc_feature 1..23: note = Synthetic
  source 1..23: mol_type = other RNA
agacgatttcgatctggacatgt

SEQ ID NO: 18164 - RNA, 24 nt, synthetic construct
  misc_feature 1..24: note = Synthetic
  source 1..24: mol_type = other RNA
tagacgatttcgatctggacatgt

SEQ ID NO: 18165 - RNA, 18 nt, synthetic construct
  misc_feature 1..18: note = Synthetic
  source 1..18: mol_type = other RNA
tttcgatctggacatgtt

SEQ ID NO: 18166 - RNA, 19 nt, synthetic construct
  misc_feature 1..19: note = Synthetic
  source 1..19: mol_type = other RNA
atttcgatctggacatgtt

SEQ ID NO: 18167 - RNA, 21 nt, synthetic construct
  misc_feature 1..21: note = Synthetic
  source 1..21: mol_type = other RNA
cgatttcgatctggacatgtt

SEQ ID NO: 18168 - RNA, 22 nt, synthetic construct
  misc_feature 1..22: note = Synthetic
  source 1..22: mol_type = other RNA
acgatttcgatctggacatgtt

SEQ ID NO: 18169 - RNA, 23 nt, synthetic construct
  misc_feature 1..23: note = Synthetic
  source 1..23: mol_type = other RNA
gacgatttcgatctggacatgtt

SEQ ID NO: 18170 - RNA, 24 nt, synthetic construct
  misc_feature 1..24: note = Synthetic
  source 1..24: mol_type = other RNA
agacgatttcgatctggacatgtt

SEQ ID NO: 18171 - RNA, 17 nt, synthetic construct
  misc_feature 1..17: note = Synthetic
  source 1..17: mol_type = other RNA
gcgtggaagaaacgaga

SEQ ID NO: 18172 - RNA, 17 nt, synthetic construct
  misc_feature 1..17: note = Synthetic
  source 1..17: mol_type = other RNA
cggcgacgtggccttcc

SEQ ID NO: 18173 - RNA, 20 nt, synthetic construct
  misc_feature 1..20: note = Synthetic
  source 1..20: mol_type = other RNA
tcggcgtggaagaaacgaga

SEQ ID NO: 18174 - RNA, 20 nt, synthetic construct
  misc_feature 1..20: note = Synthetic
  source 1..20: mol_type = other RNA
ccacggcgacgtggccttcc

SEQ ID NO: 18175 - RNA, 17 nt, synthetic construct
  misc_feature 1..17: note = Synthetic
  source 1..17: mol_type = other RNA
cgaagttggactcgtat

SEQ ID NO: 18176 - RNA, 20 nt, synthetic construct
  misc_feature 1..20: note = Synthetic
  source 1..20: mol_type = other RNA
gggcgaagttggactcgtat

SEQ ID NO: 18177 - RNA, 20 nt, synthetic construct
  misc_feature 1..20: note = Synthetic
  source 1..20: mol_type = other RNA
gattggttctgggggcacgc

SEQ ID NO: 18178 - RNA, 20 nt, synthetic construct
  misc_feature 1..20: note = Synthetic
  source 1..20: mol_type = other RNA
ggttctgggggcacgccggc

SEQ ID NO: 18179 - RNA, 20 nt, synthetic construct
  misc_feature 1..20: note = Synthetic
  source 1..20: mol_type = other RNA
gttctgggggcacgccggcg

SEQ ID NO: 18180 - RNA, 17 nt, synthetic construct
  misc_feature 1..17: note = Synthetic
  source 1..17: mol_type = other RNA
agccgacagcccggtca

SEQ ID NO: 18181 - RNA, 17 nt, synthetic construct
  misc_feature 1..17: note = Synthetic
  source 1..17: mol_type = other RNA
tctgggggcacgccggc

SEQ ID NO: 18182 - RNA, 20 nt, synthetic construct
  misc_feature 1..20: note = Synthetic
  source 1..20: mol_type = other RNA
tcaatgtcagtcgccatgac

SEQ ID NO: 18183 - RNA, 20 nt, synthetic construct
  misc_feature 1..20: note = Synthetic
  source 1..20: mol_type = other RNA
caatgtcagtcgccatgacc

SEQ ID NO: 18184 - RNA, 20 nt, synthetic construct
  misc_feature 1..20: note = Synthetic
  source 1..20: mol_type = other RNA
cccagaaccaatcgcaaccc

SEQ ID NO: 18185 - RNA, 20 nt, synthetic construct
  misc_feature 1..20: note = Synthetic
  source 1..20: mol_type = other RNA
cccgacggcagccgacagcc

SEQ ID NO: 18186 - RNA, 20 nt, synthetic construct
  misc_feature 1..20: note = Synthetic
  source 1..20: mol_type = other RNA
ctgtcggctgccgtcggggc

SEQ ID NO: 18187 - RNA, 20 nt, synthetic construct
  misc_feature 1..20: note = Synthetic
  source 1..20: mol_type = other RNA
ccgggctgtcggctgccgtc

SEQ ID NO: 18188 - RNA, 20 nt, synthetic construct
  misc_feature 1..20: note = Synthetic
  source 1..20: mol_type = other RNA
cccagggttgcgattggttc

SEQ ID NO: 18189 - RNA, 20 nt, synthetic construct
  misc_feature 1..20: note = Synthetic
  source 1..20: mol_type = other RNA
cgggctgtcggctgccgtcg

SEQ ID NO: 18190 - RNA, 20 nt, synthetic construct
  misc_feature 1..20: note = Synthetic
  source 1..20: mol_type = other RNA
tggttctgggggcacgccgg

SEQ ID NO: 18191 - RNA, 20 nt, synthetic construct
  misc_feature 1..20: note = Synthetic
  source 1..20: mol_type = other RNA
ttctgggggcacgccggcgg

SEQ ID NO: 18192 - RNA, 20 nt, synthetic construct
  misc_feature 1..20: note = Synthetic
  source 1..20: mol_type = other RNA
agggttgcgattggttctgg

SEQ ID NO: 18193 - RNA, 20 nt, synthetic construct
  misc_feature 1..20: note = Synthetic
  source 1..20: mol_type = other RNA
ccagaaccaatcgcaaccct

SEQ ID NO: 18194 - RNA, 20 nt, synthetic construct
  misc_feature 1..20: note = Synthetic
  source 1..20: mol_type = other RNA
accgggctgtcggctgccgt

SEQ ID NO: 18195 - RNA, 20 nt, synthetic construct
  misc_feature 1..20: note = Synthetic
  source 1..20: mol_type = other RNA
agtcgccatgaccgggctgt

SEQ ID NO: 18196 - RNA, 17 nt, synthetic construct
  misc_feature 1..17: note = Synthetic
  source 1..17: mol_type = other RNA
gacggcagccgacagcc

SEQ ID NO: 18197 - RNA, 17 nt, synthetic construct
  misc_feature 1..17: note = Synthetic
  source 1..17: mol_type = other RNA
ggctgtcggctgccgtc

SEQ ID NO: 18198 - RNA, 17 nt, synthetic construct
  misc_feature 1..17: note = Synthetic
  source 1..17: mol_type = other RNA
gctgtcggctgccgtcg

SEQ ID NO: 18199 - RNA, 17 nt, synthetic construct
  misc_feature 1..17: note = Synthetic
  source 1..17: mol_type = other RNA
gttgcgattggttctgg

SEQ ID NO: 18200 - RNA, 17 nt, synthetic construct
  misc_feature 1..17: note = Synthetic
  source 1..17: mol_type = other RNA
gggctgtcggctgccgt

SEQ ID NO: 18201 - RNA, 20 nt, synthetic construct
  misc_feature 1..20: note = Synthetic
  source 1..20: mol_type = other RNA
ggcagccgacagcccggtca

SEQ ID NO: 18202 - RNA, 17 nt, synthetic construct
  misc_feature 1..17: note = Synthetic
  source 1..17: mol_type = other RNA
atgtcagtcgccatgac

SEQ ID NO: 18203 - RNA, 17 nt, synthetic construct
  misc_feature 1..17: note = Synthetic
  source 1..17: mol_type = other RNA
tgtcagtcgccatgacc

SEQ ID NO: 18204 - RNA, 17 nt, synthetic construct
  misc_feature 1..17: note = Synthetic
  source 1..17: mol_type = other RNA
tggttctgggggcacgc

SEQ ID NO: 18205 - RNA, 17 nt, synthetic construct
  misc_feature 1..17: note = Synthetic
  source 1..17: mol_type = other RNA
tcggctgccgtcggggc

SEQ ID NO: 18206 - RNA, 17 nt, synthetic construct
  misc_feature 1..17: note = Synthetic
  source 1..17: mol_type = other RNA
ctgggggcacgccggcg

SEQ ID NO: 18207 - RNA, 17 nt, synthetic construct
  misc_feature 1..17: note = Synthetic
  source 1..17: mol_type = other RNA
ttctgggggcacgccgg

SEQ ID NO: 18208 - RNA, 17 nt, synthetic construct
  misc_feature 1..17: note = Synthetic
  source 1..17: mol_type = other RNA
tgggggcacgccggcgg

SEQ ID NO: 18209 - RNA, 17 nt, synthetic construct
  misc_feature 1..17: note = Synthetic
  source 1..17: mol_type = other RNA
cgccatgaccgggctgt

SEQ ID NO: 18210 - RNA, 20 nt, synthetic construct
  misc_feature 1..20: note = Synthetic
  source 1..20: mol_type = other RNA
ccagggttgcgattggttct

SEQ ID NO: 18211 - RNA, 17 nt, synthetic construct
  misc_feature 1..17: note = Synthetic
  source 1..17: mol_type = other RNA
ttattgtacctaaaaca

SEQ ID NO: 18212 - RNA, 17 nt, synthetic construct
  misc_feature 1..17: note = Synthetic
  source 1..17: mol_type = other RNA
tttattgtacctaaaac

SEQ ID NO: 18213 - RNA, 17 nt, synthetic construct
  misc_feature 1..17: note = Synthetic
  source 1..17: mol_type = other RNA
ttgcaactccctgtttt

SEQ ID NO: 18214 - RNA, 20 nt, synthetic construct
  misc_feature 1..20: note = Synthetic
  source 1..20: mol_type = other RNA
tttttattgtacctaaaaca

SEQ ID NO: 18215 - RNA, 20 nt, synthetic construct
  misc_feature 1..20: note = Synthetic
  source 1..20: mol_type = other RNA
gtttttattgtacctaaaac

SEQ ID NO: 18216 - RNA, 20 nt, synthetic construct
  misc_feature 1..20: note = Synthetic
  source 1..20: mol_type = other RNA
ttattgcaactccctgtttt

SEQ ID NO: 18217 - RNA, 21 nt, synthetic construct
  misc_feature 1..21: note = Synthetic
  source 1..21: mol_type = other RNA
gcgtctgggtgctgggtacgc

SEQ ID NO: 18218 - RNA, 22 nt, synthetic construct
  misc_feature 1..22: note = Synthetic
  source 1..22: mol_type = other RNA
ggcgtctgggtgctgggtacgc

SEQ ID NO: 18219 - RNA, 24 nt, synthetic construct
  misc_feature 1..24: note = Synthetic
  source 1..24: mol_type = other RNA
gaggcgtctgggtgctgggtacgc

SEQ ID NO: 18220 - RNA, 19 nt, synthetic construct
  misc_feature 1..19: note = Synthetic
  source 1..19: mol_type = other RNA
gttctgggggcacgccggc

SEQ ID NO: 18221 - RNA, 24 nt, synthetic construct
  misc_feature 1..24: note = Synthetic
  source 1..24: mol_type = other RNA
gattggttctgggggcacgccggc

SEQ ID NO: 18222 - RNA, 19 nt, synthetic construct
  misc_feature 1..19: note = Synthetic
  source 1..19: mol_type = other RNA
gaccgccgggcgagcggcg

SEQ ID NO: 18223 - RNA, 20 nt, synthetic construct
  misc_feature 1..20: note = Synthetic
  source 1..20: mol_type = other RNA
ggaccgccgggcgagcggcg

SEQ ID NO: 18224 - RNA, 22 nt, synthetic construct
  misc_feature 1..22: note = Synthetic
  source 1..22: mol_type = other RNA
gcggaccgccgggcgagcggcg

SEQ ID NO: 18225 - RNA, 23 nt, synthetic construct
  misc_feature 1..23: note = Synthetic
  source 1..23: mol_type = other RNA
ggcggaccgccgggcgagcggcg

SEQ ID NO: 18226 - RNA, 24 nt, synthetic construct
  misc_feature 1..24: note = Synthetic
  source 1..24: mol_type = other RNA
gggcggaccgccgggcgagcggcg

SEQ ID NO: 18227 - RNA, 18 nt, synthetic construct
  misc_feature 1..18: note = Synthetic
  source 1..18: mol_type = other RNA
ggctctccgccggctcgg

SEQ ID NO: 18228 - RNA, 21 nt, synthetic construct
  misc_feature 1..21: note = Synthetic
  source 1..21: mol_type = other RNA
ggcggctctccgccggctcgg

SEQ ID NO: 18229 - RNA, 23 nt, synthetic construct
  misc_feature 1..23: note = Synthetic
  source 1..23: mol_type = other RNA
gcggcggctctccgccggctcgg

SEQ ID NO: 18230 - RNA, 18 nt, synthetic construct
  misc_feature 1..18: note = Synthetic
  source 1..18: mol_type = other RNA
ggacgaggcgtctgggtg

SEQ ID NO: 18231 - RNA, 21 nt, synthetic construct
  misc_feature 1..21: note = Synthetic
  source 1..21: mol_type = other RNA
gtcggacgaggcgtctgggtg

SEQ ID NO: 18232 - RNA, 21 nt, synthetic construct
  misc_feature 1..21: note = Synthetic
  source 1..21: mol_type = other RNA
gctccggtccgtcctctccgt

SEQ ID NO: 18233 - RNA, 22 nt, synthetic construct
  misc_feature 1..22: note = Synthetic
  source 1..22: mol_type = other RNA
ggctccggtccgtcctctccgt

SEQ ID NO: 18234 - RNA, 19 nt, synthetic construct
  misc_feature 1..19: note = Synthetic
  source 1..19: mol_type = other RNA
gctccgtcggacgaggcgt

SEQ ID NO: 18235 - RNA, 22 nt, synthetic construct
  misc_feature 1..22: note = Synthetic
  source 1..22: mol_type = other RNA
gccgctccgtcggacgaggcgt

SEQ ID NO: 18236 - RNA, 18 nt, synthetic construct
  misc_feature 1..18: note = Synthetic
  source 1..18: mol_type = other RNA
ggctgggctttggtcggt

SEQ ID NO: 18237 - RNA, 21 nt, synthetic construct
  misc_feature 1..21: note = Synthetic
  source 1..21: mol_type = other RNA
gcaggctgggctttggtcggt

SEQ ID NO: 18238 - RNA, 22 nt, synthetic construct
  misc_feature 1..22: note = Synthetic
  source 1..22: mol_type = other RNA
ggcaggctgggctttggtcggt

SEQ ID NO: 18239 - RNA, 23 nt, synthetic construct
  misc_feature 1..23: note = Synthetic
  source 1..23: mol_type = other RNA
gggcaggctgggctttggtcggt

SEQ ID NO: 18240 - RNA, 21 nt, synthetic construct
  misc_feature 1..21: note = Synthetic
  source 1..21: mol_type = other RNA
ggcggacgccgtgggcgtcgc

SEQ ID NO: 18241 - RNA, 23 nt, synthetic construct
  misc_feature 1..23: note = Synthetic
  source 1..23: mol_type = other RNA
gcggcggacgccgtgggcgtcgc

SEQ ID NO: 18242 - RNA, 22 nt, synthetic construct
  misc_feature 1..22: note = Synthetic
  source 1..22: mol_type = other RNA
gacctggaatcggacagcagcg

SEQ ID NO: 18243 - RNA, 23 nt, synthetic construct
  misc_feature 1..23: note = Synthetic
  source 1..23: mol_type = other RNA
gacgccgtgggcgtcgcaggggt

SEQ ID NO: 18244 - RNA, 24 nt, synthetic construct
  misc_feature 1..24: note = Synthetic
  source 1..24: mol_type = other RNA
ggacgccgtgggcgtcgcaggggt

SEQ ID NO: 18245 - RNA, 23 nt, synthetic construct
  misc_feature 1..23: note = Synthetic
  source 1..23: mol_type = other RNA
aggcgtctgggtgctgggtacgc

SEQ ID NO: 18246 - RNA, 18 nt, synthetic construct
  misc_feature 1..18: note = Synthetic
  source 1..18: mol_type = other RNA
ttctgggggcacgccggc

SEQ ID NO: 18247 - RNA, 21 nt, synthetic construct
  misc_feature 1..21: note = Synthetic
  source 1..21: mol_type = other RNA
tggttctgggggcacgccggc

SEQ ID NO: 18248 - RNA, 22 nt, synthetic construct
  misc_feature 1..22: note = Synthetic
  source 1..22: mol_type = other RNA
ttggttctgggggcacgccggc

SEQ ID NO: 18249 - RNA, 23 nt, synthetic construct
  misc_feature 1..23: note = Synthetic
  source 1..23: mol_type = other RNA
attggttctgggggcacgccggc

SEQ ID NO: 18250 - RNA, 18 nt, synthetic construct
  misc_feature 1..18: note = Synthetic
  source 1..18: mol_type = other RNA
accgccgggcgagcggcg

SEQ ID NO: 18251 - RNA, 21 nt, synthetic construct
  misc_feature 1..21: note = Synthetic
  source 1..21: mol_type = other RNA
cggaccgccgggcgagcggcg

SEQ ID NO: 18252 - RNA, 19 nt, synthetic construct
  misc_feature 1..19: note = Synthetic
  source 1..19: mol_type = other RNA
cggctctccgccggctcgg

SEQ ID NO: 18253 - RNA, 22 nt, synthetic construct
  misc_feature 1..22: note = Synthetic
  source 1..22: mol_type = other RNA
cggcggctctccgccggctcgg

SEQ ID NO: 18254 - RNA, 24 nt, synthetic construct
  misc_feature 1..24: note = Synthetic
  source 1..24: mol_type = other RNA
cgcggcggctctccgccggctcgg

SEQ ID NO: 18255 - RNA, 19 nt, synthetic construct
  misc_feature 1..19: note = Synthetic
  source 1..19: mol_type = other RNA
cggacgaggcgtctgggtg

SEQ ID NO: 18256 - RNA, 22 nt, synthetic construct
  misc_feature 1..22: note = Synthetic
  source 1..22: mol_type = other RNA
cgtcggacgaggcgtctgggtg

SEQ ID NO: 18257 - RNA, 23 nt, synthetic construct
  misc_feature 1..23: note = Synthetic
  source 1..23: mol_type = other RNA
ccgtcggacgaggcgtctgggtg

SEQ ID NO: 18258 - RNA, 24 nt, synthetic construct
  misc_feature 1..24: note = Synthetic
  source 1..24: mol_type = other RNA
tccgtcggacgaggcgtctgggtg

SEQ ID NO: 18259 - RNA, 18 nt, synthetic construct
  misc_feature 1..18: note = Synthetic
  source 1..18: mol_type = other RNA
ccggtccgtcctctccgt

SEQ ID NO: 18260 - RNA, 19 nt, synthetic construct
  misc_feature 1..19: note = Synthetic
  source 1..19: mol_type = other RNA
tccggtccgtcctctccgt

SEQ ID NO: 18261 - RNA, 23 nt, synthetic construct
  misc_feature 1..23: note = Synthetic
  source 1..23: mol_type = other RNA
cggctccggtccgtcctctccgt

SEQ ID NO: 18262 - RNA, 24 nt, synthetic construct
  misc_feature 1..24: note = Synthetic
  source 1..24: mol_type = other RNA
tcggctccggtccgtcctctccgt

SEQ ID NO: 18263 - RNA, 18 nt, synthetic construct
  misc_feature 1..18: note = Synthetic
  source 1..18: mol_type = other RNA
ctccgtcggacgaggcgt

SEQ ID NO: 18264 - RNA, 20 nt, synthetic construct
  misc_feature 1..20: note = Synthetic
  source 1..20: mol_type = other RNA
cgctccgtcggacgaggcgt

SEQ ID NO: 18265 - RNA, 21 nt, synthetic construct
  misc_feature 1..21: note = Synthetic
  source 1..21: mol_type = other RNA
ccgctccgtcggacgaggcgt

SEQ ID NO: 18266 - RNA, 23 nt, synthetic construct
  misc_feature 1..23: note = Synthetic
  source 1..23: mol_type = other RNA
tgccgctccgtcggacgaggcgt

SEQ ID NO: 18267 - RNA, 24 nt, synthetic construct
  misc_feature 1..24: note = Synthetic
  source 1..24: mol_type = other RNA
ctgccgctccgtcggacgaggcgt

SEQ ID NO: 18268 - RNA, 19 nt, synthetic construct
  misc_feature 1..19: note = Synthetic
  source 1..19: mol_type = other RNA
aggctgggctttggtcggt

SEQ ID NO: 18269 - RNA, 24 nt, synthetic construct
  misc_feature 1..24: note = Synthetic
  source 1..24: mol_type = other RNA
cgggcaggctgggctttggtcggt

SEQ ID NO: 18270 - RNA, 21 nt, synthetic construct
  misc_feature 1..21: note = Synthetic
  source 1..21: mol_type = other RNA
acacactgtggggcgctggtt

SEQ ID NO: 18271 - RNA, 22 nt, synthetic construct
  misc_feature 1..22: note = Synthetic
  source 1..22: mol_type = other RNA
cacacactgtggggcgctggtt

SEQ ID NO: 18272 - RNA, 23 nt, synthetic construct
  misc_feature 1..23: note = Synthetic
  source 1..23: mol_type = other RNA
ccacacactgtggggcgctggtt

SEQ ID NO: 18273 - RNA, 24 nt, synthetic construct
  misc_feature 1..24: note = Synthetic
  source 1..24: mol_type = other RNA
accacacactgtggggcgctggtt

SEQ ID NO: 18274 - RNA, 22 nt, synthetic construct
  misc_feature 1..22: note = Synthetic
  source 1..22: mol_type = other RNA
cggcggacgccgtgggcgtcgc

SEQ ID NO: 18275 - RNA, 24 nt, synthetic construct
  misc_feature 1..24: note = Synthetic
  source 1..24: mol_type = other RNA
cgcggcggacgccgtgggcgtcgc

SEQ ID NO: 18276 - RNA, 18 nt, synthetic construct
  misc_feature 1..18: note = Synthetic
  source 1..18: mol_type = other RNA
tggaatcggacagcagcg

SEQ ID NO: 18277 - RNA, 19 nt, synthetic construct
  misc_feature 1..19: note = Synthetic
  source 1..19: mol_type = other RNA
ctggaatcggacagcagcg

SEQ ID NO: 18278 - RNA, 21 nt, synthetic construct
  misc_feature 1..21: note = Synthetic
  source 1..21: mol_type = other RNA
acctggaatcggacagcagcg

SEQ ID NO: 18279 - RNA, 23 nt, synthetic construct
  misc_feature 1..23: note = Synthetic
  source 1..23: mol_type = other RNA
cgacctggaatcggacagcagcg

SEQ ID NO: 18280 - RNA, 24 nt, synthetic construct
  misc_feature 1..24: note = Synthetic
  source 1..24: mol_type = other RNA
acgacctggaatcggacagcagcg

SEQ ID NO: 18281 - RNA, 21 nt, synthetic construct
  misc_feature 1..21: note = Synthetic
  source 1..21: mol_type = other RNA
cgccgtgggcgtcgcaggggt

SEQ ID NO: 18282 - RNA, 22 nt, synthetic construct
  misc_feature 1..22: note = Synthetic
  source 1..22: mol_type = other RNA
acgccgtgggcgtcgcaggggt

SEQ ID NO: 18283 - RNA, 18 nt, synthetic construct
  misc_feature 1..18: note = Synthetic
  source 1..18: mol_type = other RNA
tctgggtgctgggtacgc

SEQ ID NO: 18284 - RNA, 19 nt, synthetic construct
  misc_feature 1..19: note = Synthetic
  source 1..19: mol_type = other RNA
gtctgggtgctgggtacgc

SEQ ID NO: 18285 - RNA, 18 nt, synthetic construct
  misc_feature 1..18: note = Synthetic
  source 1..18: mol_type = other RNA
cactgtggggcgctggtt

SEQ ID NO: 18286 - RNA, 19 nt, synthetic construct
  misc_feature 1..19: note = Synthetic
  source 1..19: mol_type = other RNA
acactgtggggcgctggtt

SEQ ID NO: 18287 - RNA, 20 nt, synthetic construct
  misc_feature 1..20: note = Synthetic
  source 1..20: mol_type = other RNA
cacactgtggggcgctggtt

SEQ ID NO: 18288 - RNA, 18 nt, synthetic construct
  misc_feature 1..18: note = Synthetic
  source 1..18: mol_type = other RNA
agagccgccgcgacgacc

SEQ ID NO: 18289 - RNA, 19 nt, synthetic construct
  misc_feature 1..19: note = Synthetic
  source 1..19: mol_type = other RNA
gagagccgccgcgacgacc

SEQ ID NO: 18290 - RNA, 21 nt, synthetic construct
  misc_feature 1..21: note = Synthetic
  source 1..21: mol_type = other RNA
cggagagccgccgcgacgacc

SEQ ID NO: 18291 - RNA, 22 nt, synthetic construct
  misc_feature 1..22: note = Synthetic
  source 1..22: mol_type = other RNA
gcggagagccgccgcgacgacc

SEQ ID NO: 18292 - RNA, 23 nt, synthetic construct
  misc_feature 1..23: note = Synthetic
  source 1..23: mol_type = other RNA
ggcggagagccgccgcgacgacc

SEQ ID NO: 18293 - RNA, 24 nt, synthetic construct
  misc_feature 1..24: note = Synthetic
  source 1..24: mol_type = other RNA
cggcggagagccgccgcgacgacc

SEQ ID NO: 18294 - RNA, 18 nt, synthetic construct
  misc_feature 1..18: note = Synthetic
  source 1..18: mol_type = other RNA
ggacgccgtgggcgtcgc

SEQ ID NO: 18295 - RNA, 19 nt, synthetic construct
  misc_feature 1..19: note = Synthetic
  source 1..19: mol_type = other RNA
cggacgccgtgggcgtcgc

SEQ ID NO: 18296 - RNA, 18 nt, synthetic construct
  misc_feature 1..18: note = Synthetic
  source 1..18: mol_type = other RNA
cgtgggcgtcgcaggggt

SEQ ID NO: 18297 - RNA, 19 nt, synthetic construct
  misc_feature 1..19: note = Synthetic
  source 1..19: mol_type = other RNA
ccgtgggcgtcgcaggggt

SEQ ID NO: 18298 - RNA, 18 nt, synthetic construct
  misc_feature 1..18: note = Synthetic
  source 1..18: mol_type = other RNA
caatgtcagtcgccatga

SEQ ID NO: 18299 - RNA, 19 nt, synthetic construct
  misc_feature 1..19: note = Synthetic
  source 1..19: mol_type = other RNA
tcaatgtcagtcgccatga

SEQ ID NO: 18300 - RNA, 20 nt, synthetic construct
  misc_feature 1..20: note = Synthetic
  source 1..20: mol_type = other RNA
atcaatgtcagtcgccatga

SEQ ID NO: 18301 - RNA, 21 nt, synthetic construct
  misc_feature 1..21: note = Synthetic
  source 1..21: mol_type = other RNA
tatcaatgtcagtcgccatga

SEQ ID NO: 18302 - RNA, 22 nt, synthetic construct
  misc_feature 1..22: note = Synthetic
  source 1..22: mol_type = other RNA
atatcaatgtcagtcgccatga

SEQ ID NO: 18303 - RNA, 23 nt, synthetic construct
  misc_feature 1..23: note = Synthetic
  source 1..23: mol_type = other RNA
catatcaatgtcagtcgccatga

SEQ ID NO: 18304 - RNA, 24 nt, synthetic construct
  misc_feature 1..24: note = Synthetic
  source 1..24: mol_type = other RNA
gcatatcaatgtcagtcgccatga

SEQ ID NO: 18305 - RNA, 18 nt, synthetic construct
  misc_feature 1..18: note = Synthetic
  source 1..18: mol_type = other RNA
tccatgtcctcgtccgac

SEQ ID NO: 18306 - RNA, 19 nt, synthetic construct
  misc_feature 1..19: note = Synthetic
  source 1..19: mol_type = other RNA
ttccatgtcctcgtccgac

SEQ ID NO: 18307 - RNA, 20 nt, synthetic construct
  misc_feature 1..20: note = Synthetic
  source 1..20: mol_type = other RNA
cttccatgtcctcgtccgac

SEQ ID NO: 18308 - RNA, 21 nt, synthetic construct
  misc_feature 1..21: note = Synthetic
  source 1..21: mol_type = other RNA
tcttccatgtcctcgtccgac

SEQ ID NO: 18309 - RNA, 22 nt, synthetic construct
  misc_feature 1..22: note = Synthetic
  source 1..22: mol_type = other RNA
gtcttccatgtcctcgtccgac

SEQ ID NO: 18310 - RNA, 23 nt, synthetic construct
  misc_feature 1..23: note = Synthetic
  source 1..23: mol_type = other RNA
ggtcttccatgtcctcgtccgac

SEQ ID NO: 18311 - RNA, 24 nt, synthetic construct
  misc_feature 1..24: note = Synthetic
  source 1..24: mol_type = other RNA
gggtcttccatgtcctcgtccgac

SEQ ID NO: 18312 - RNA, 18 nt, synthetic construct
  misc_feature 1..18: note = Synthetic
  source 1..18: mol_type = other RNA
acaaaccatcggcagccc

SEQ ID NO: 18313 - RNA, 19 nt, synthetic construct
  misc_feature 1..19: note = Synthetic
  source 1..19: mol_type = other RNA
gacaaaccatcggcagccc

SEQ ID NO: 18314 - RNA, 21 nt, synthetic construct
  misc_feature 1..21: note = Synthetic
  source 1..21: mol_type = other RNA
ccgacaaaccatcggcagccc

SEQ ID NO: 18315 - RNA, 22 nt, synthetic construct
  misc_feature 1..22: note = Synthetic
  source 1..22: mol_type = other RNA
tccgacaaaccatcggcagccc

SEQ ID NO: 18316 - RNA, 23 nt, synthetic construct
  misc_feature 1..23: note = Synthetic
  source 1..23: mol_type = other RNA
gtccgacaaaccatcggcagccc

SEQ ID NO: 18317 - RNA, 24 nt, synthetic construct
  misc_feature 1..24: note = Synthetic
  source 1..24: mol_type = other RNA
ggtccgacaaaccatcggcagccc

SEQ ID NO: 18318 - RNA, 18 nt, synthetic construct
  misc_feature 1..18: note = Synthetic
  source 1..18: mol_type = other RNA
gacaaaccatcggcagcc

SEQ ID NO: 18319 - RNA, 19 nt, synthetic construct
  misc_feature 1..19: note = Synthetic
  source 1..19: mol_type = other RNA
cgacaaaccatcggcagcc

SEQ ID NO: 18320 - RNA, 20 nt, synthetic construct
  misc_feature 1..20: note = Synthetic
  source 1..20: mol_type = other RNA
ccgacaaaccatcggcagcc

SEQ ID NO: 18321 - RNA, 21 nt, synthetic construct
  misc_feature 1..21: note = Synthetic
  source 1..21: mol_type = other RNA
tccgacaaaccatcggcagcc

SEQ ID NO: 18322 - RNA, 22 nt, synthetic construct
  misc_feature 1..22: note = Synthetic
  source 1..22: mol_type = other RNA
gtccgacaaaccatcggcagcc

SEQ ID NO: 18323 - RNA, 23 nt, synthetic construct
  misc_feature 1..23: note = Synthetic
  source 1..23: mol_type = other RNA
ggtccgacaaaccatcggcagcc

SEQ ID NO: 18324 - RNA, 24 nt, synthetic construct
  misc_feature 1..24: note = Synthetic
  source 1..24: mol_type = other RNA
gggtccgacaaaccatcggcagcc

SEQ ID NO: 18325 - RNA, 18 nt, synthetic construct
  misc_feature 1..18: note = Synthetic
  source 1..18: mol_type = other RNA
acgcccacggcgtccgcc

SEQ ID NO: 18326 - RNA, 19 nt, synthetic construct
  misc_feature 1..19: note = Synthetic
  source 1..19: mol_type = other RNA
gacgcccacggcgtccgcc

SEQ ID NO: 18327 - RNA, 21 nt, synthetic construct
  misc_feature 1..21: note = Synthetic
  source 1..21: mol_type = other RNA
gcgacgcccacggcgtccgcc

SEQ ID NO: 18328 - RNA, 22 nt, synthetic construct
  misc_feature 1..22: note = Synthetic
  source 1..22: mol_type = other RNA
tgcgacgcccacggcgtccgcc

SEQ ID NO: 18329 - RNA, 23 nt, synthetic construct
  misc_feature 1..23: note = Synthetic
  source 1..23: mol_type = other RNA
ctgcgacgcccacggcgtccgcc

SEQ ID NO: 18330 - RNA, 24 nt, synthetic construct
  misc_feature 1..24: note = Synthetic
  source 1..24: mol_type = other RNA
cctgcgacgcccacggcgtccgcc

SEQ ID NO: 18331 - RNA, 18 nt, synthetic construct
  misc_feature 1..18: note = Synthetic
  source 1..18: mol_type = other RNA
caagacggtcgccgggcc

SEQ ID NO: 18332 - RNA, 19 nt, synthetic construct
  misc_feature 1..19: note = Synthetic
  source 1..19: mol_type = other RNA
gcaagacggtcgccgggcc

SEQ ID NO: 18333 - RNA, 20 nt, synthetic construct
  misc_feature 1..20: note = Synthetic
  source 1..20: mol_type = other RNA
agcaagacggtcgccgggcc

SEQ ID NO: 18334 - RNA, 21 nt, synthetic construct
  misc_feature 1..21: note = Synthetic
  source 1..21: mol_type = other RNA
gagcaagacggtcgccgggcc

SEQ ID NO: 18335 - RNA, 22 nt, synthetic construct
  misc_feature 1..22: note = Synthetic
  source 1..22: mol_type = other RNA
ggagcaagacggtcgccgggcc

SEQ ID NO: 18336 - RNA, 23 nt, synthetic construct
  misc_feature 1..23: note = Synthetic
  source 1..23: mol_type = other RNA
gggagcaagacggtcgccgggcc

SEQ ID NO: 18337 - RNA, 24 nt, synthetic construct
  misc_feature 1..24: note = Synthetic
  source 1..24: mol_type = other RNA
ggggagcaagacggtcgccgggcc

SEQ ID NO: 18338 - RNA, 18 nt, synthetic construct
  misc_feature 1..18: note = Synthetic
  source 1..18: mol_type = other RNA
ctccggtccgtcctctcc

SEQ ID NO: 18339 - RNA, 19 nt, synthetic construct
  misc_feature 1..19: note = Synthetic
  source 1..19: mol_type = other RNA
gctccggtccgtcctctcc

SEQ ID NO: 18340 - RNA, 20 nt, synthetic construct
  misc_feature 1..20: note = Synthetic
  source 1..20: mol_type = other RNA
ggctccggtccgtcctctcc

SEQ ID NO: 18341 - RNA, 21 nt, synthetic construct
  misc_feature 1..21: note = Synthetic
  source 1..21: mol_type = other RNA
cggctccggtccgtcctctcc

SEQ ID NO: 18342 - RNA, 22 nt, synthetic construct
  misc_feature 1..22: note = Synthetic
  source 1..22: mol_type = other RNA
tcggctccggtccgtcctctcc

SEQ ID NO: 18343 - RNA, 23 nt, synthetic construct
  misc_feature 1..23: note = Synthetic
  source 1..23: mol_type = other RNA
atcggctccggtccgtcctctcc

SEQ ID NO: 18344 - RNA, 24 nt, synthetic construct
  misc_feature 1..24: note = Synthetic
  source 1..24: mol_type = other RNA
tatcggctccggtccgtcctctcc

SEQ ID NO: 18345 - RNA, 18 nt, synthetic construct
  misc_feature 1..18: note = Synthetic
  source 1..18: mol_type = other RNA
cggcggctctccgccggc

SEQ ID NO: 18346 - RNA, 19 nt, synthetic construct
  misc_feature 1..19: note = Synthetic
  source 1..19: mol_type = other RNA
gcggcggctctccgccggc

SEQ ID NO: 18347 - RNA, 20 nt, synthetic construct
  misc_feature 1..20: note = Synthetic
  source 1..20: mol_type = other RNA
cgcggcggctctccgccggc

SEQ ID NO: 18348 - RNA, 21 nt, synthetic construct
  misc_feature 1..21: note = Synthetic
  source 1..21: mol_type = other RNA
tcgcggcggctctccgccggc

SEQ ID NO: 18349 - RNA, 22 nt, synthetic construct
  misc_feature 1..22: note = Synthetic
  source 1..22: mol_type = other RNA
gtcgcggcggctctccgccggc

SEQ ID NO: 18350 - RNA, 23 nt, synthetic construct
  misc_feature 1..23: note = Synthetic
  source 1..23: mol_type = other RNA
cgtcgcggcggctctccgccggc

SEQ ID NO: 18351 - RNA, 24 nt, synthetic construct
  misc_feature 1..24: note = Synthetic
  source 1..24: mol_type = other RNA
tcgtcgcggcggctctccgccggc

SEQ ID NO: 18352 - RNA, 18 nt, synthetic construct
  misc_feature 1..18: note = Synthetic
  source 1..18: mol_type = other RNA
accttgcccccgtgctgc

SEQ ID NO: 18353 - RNA, 19 nt, synthetic construct
  misc_feature 1..19: note = Synthetic
  source 1..19: mol_type = other RNA
caccttgcccccgtgctgc

SEQ ID NO: 18354 - RNA, 20 nt, synthetic construct
  misc_feature 1..20: note = Synthetic
  source 1..20: mol_type = other RNA
ccaccttgcccccgtgctgc

SEQ ID NO: 18355 - RNA, 21 nt, synthetic construct
  misc_feature 1..21: note = Synthetic
  source 1..21: mol_type = other RNA
gccaccttgcccccgtgctgc

SEQ ID NO: 18356 - RNA, 22 nt, synthetic construct
  misc_feature 1..22: note = Synthetic
  source 1..22: mol_type = other RNA
ggccaccttgcccccgtgctgc

SEQ ID NO: 18357 - RNA, 23 nt, synthetic construct
  misc_feature 1..23: note = Synthetic
  source 1..23: mol_type = other RNA
gggccaccttgcccccgtgctgc

SEQ ID NO: 18358 - RNA, 24 nt, synthetic construct
  misc_feature 1..24: note = Synthetic
  source 1..24: mol_type = other RNA
cgggccaccttgcccccgtgctgc

SEQ ID NO: 18359 - RNA, 18 nt, synthetic construct
  misc_feature 1..18: note = Synthetic
  source 1..18: mol_type = other RNA
gcggctctccgccggctc

SEQ ID NO: 18360 - RNA, 19 nt, synthetic construct
  misc_feature 1..19: note = Synthetic
  source 1..19: mol_type = other RNA
ggcggctctccgccggctc

SEQ ID NO: 18361 - RNA, 21 nt, synthetic construct
  misc_feature 1..21: note = Synthetic
  source 1..21: mol_type = other RNA
gcggcggctctccgccggctc

SEQ ID NO: 18362 - RNA, 22 nt, synthetic construct
  misc_feature 1..22: note = Synthetic
  source 1..22: mol_type = other RNA
cgcggcggctctccgccggctc

SEQ ID NO: 18363 - RNA, 23 nt, synthetic construct
  misc_feature 1..23: note = Synthetic
  source 1..23: mol_type = other RNA
tcgcggcggctctccgccggctc

SEQ ID NO: 18364 - RNA, 24 nt, synthetic construct
  misc_feature 1..24: note = Synthetic
  source 1..24: mol_type = other RNA
gtcgcggcggctctccgccggctc

SEQ ID NO: 18365 - RNA, 18 nt, synthetic construct
  misc_feature 1..18: note = Synthetic
  source 1..18: mol_type = other RNA
cttgcccccgtgctgctc

SEQ ID NO: 18366 - RNA, 19 nt, synthetic construct
  misc_feature 1..19: note = Synthetic
  source 1..19: mol_type = other RNA
ccttgcccccgtgctgctc

SEQ ID NO: 18367 - RNA, 21 nt, synthetic construct
  misc_feature 1..21: note = Synthetic
  source 1..21: mol_type = other RNA
caccttgcccccgtgctgctc

SEQ ID NO: 18368 - RNA, 22 nt, synthetic construct
  misc_feature 1..22: note = Synthetic
  source 1..22: mol_type = other RNA
ccaccttgcccccgtgctgctc

SEQ ID NO: 18369 - RNA, 23 nt, synthetic construct
  misc_feature 1..23: note = Synthetic
  source 1..23: mol_type = other RNA
gccaccttgcccccgtgctgctc

SEQ ID NO: 18370 - RNA, 24 nt, synthetic construct
  misc_feature 1..24: note = Synthetic
  source 1..24: mol_type = other RNA
ggccaccttgcccccgtgctgctc

SEQ ID NO: 18371 - RNA, 18 nt, synthetic construct
  misc_feature 1..18: note = Synthetic
  source 1..18: mol_type = other RNA
cagggttgcgattggttc

SEQ ID NO: 18372 - RNA, 19 nt, synthetic construct
  misc_feature 1..19: note = Synthetic
  source 1..19: mol_type = other RNA
ccagggttgcgattggttc

SEQ ID NO: 18373 - RNA, 21 nt, synthetic construct
  misc_feature 1..21: note = Synthetic
  source 1..21: mol_type = other RNA
ccccagggttgcgattggttc

SEQ ID NO: 18374 - RNA, 22 nt, synthetic construct
  misc_feature 1..22: note = Synthetic
  source 1..22: mol_type = other RNA
cccccagggttgcgattggttc

SEQ ID NO: 18375 - RNA, 23 nt, synthetic construct
  misc_feature 1..23: note = Synthetic
  source 1..23: mol_type = other RNA
tcccccagggttgcgattggttc

SEQ ID NO: 18376 - RNA, 24 nt, synthetic construct
  misc_feature 1..24: note = Synthetic
  source 1..24: mol_type = other RNA
gtcccccagggttgcgattggttc

SEQ ID NO: 18377 - RNA, 18 nt, synthetic construct
  misc_feature 1..18: note = Synthetic
  source 1..18: mol_type = other RNA
cggggtcttctggacgag

SEQ ID NO: 18378 - RNA, 19 nt, synthetic construct
  misc_feature 1..19: note = Synthetic
  source 1..19: mol_type = other RNA
ccggggtcttctggacgag

SEQ ID NO: 18379 - RNA, 20 nt, synthetic construct
  misc_feature 1..20: note = Synthetic
  source 1..20: mol_type = other RNA
gccggggtcttctggacgag

SEQ ID NO: 18380 - RNA, 21 nt, synthetic construct
  misc_feature 1..21: note = Synthetic
  source 1..21: mol_type = other RNA
cgccggggtcttctggacgag

SEQ ID NO: 18381 - RNA, 22 nt, synthetic construct
  misc_feature 1..22: note = Synthetic
  source 1..22: mol_type = other RNA
acgccggggtcttctggacgag

SEQ ID NO: 18382 - RNA, 23 nt, synthetic construct
  misc_feature 1..23: note = Synthetic
  source 1..23: mol_type = other RNA
tacgccggggtcttctggacgag

SEQ ID NO: 18383 - RNA, 24 nt, synthetic construct
  misc_feature 1..24: note = Synthetic
  source 1..24: mol_type = other RNA
gtacgccggggtcttctggacgag

SEQ ID NO: 18384 - RNA, 18 nt, synthetic construct
  misc_feature 1..18: note = Synthetic
  source 1..18: mol_type = other RNA
ggtcggtgggggttggag

SEQ ID NO: 18385 - RNA, 19 nt, synthetic construct
  misc_feature 1..19: note = Synthetic
  source 1..19: mol_type = other RNA
tggtcggtgggggttggag

SEQ ID NO: 18386 - RNA, 20 nt, synthetic construct
  misc_feature 1..20: note = Synthetic
  source 1..20: mol_type = other RNA
ttggtcggtgggggttggag

SEQ ID NO: 18387 - RNA, 21 nt, synthetic construct
  misc_feature 1..21: note = Synthetic
  source 1..21: mol_type = other RNA
tttggtcggtgggggttggag

SEQ ID NO: 18388 - RNA, 22 nt, synthetic construct
  misc_feature 1..22: note = Synthetic
  source 1..22: mol_type = other RNA
ctttggtcggtgggggttggag

SEQ ID NO: 18389 - RNA, 23 nt, synthetic construct
  misc_feature 1..23: note = Synthetic
  source 1..23: mol_type = other RNA
gctttggtcggtgggggttggag

SEQ ID NO: 18390 - RNA, 24 nt, synthetic construct
  misc_feature 1..24: note = Synthetic
  source 1..24: mol_type = other RNA
ggctttggtcggtgggggttggag

SEQ ID NO: 18391 - RNA, 18 nt, synthetic construct
  misc_feature 1..18: note = Synthetic
  source 1..18: mol_type = other RNA
ccatgtcctcgtccgacg

SEQ ID NO: 18392 - RNA, 19 nt, synthetic construct
  misc_feature 1..19: note = Synthetic
  source 1..19: mol_type = other RNA
tccatgtcctcgtccgacg

SEQ ID NO: 18393 - RNA, 21 nt, synthetic construct
  misc_feature 1..21: note = Synthetic
  source 1..21: mol_type = other RNA
cttccatgtcctcgtccgacg

SEQ ID NO: 18394 - RNA, 22 nt, synthetic construct
  misc_feature 1..22: note = Synthetic
  source 1..22: mol_type = other RNA
tcttccatgtcctcgtccgacg

SEQ ID NO: 18395 - RNA, 23 nt, synthetic construct
  misc_feature 1..23: note = Synthetic
  source 1..23: mol_type = other RNA
gtcttccatgtcctcgtccgacg

SEQ ID NO: 18396 - RNA, 24 nt, synthetic construct
  misc_feature 1..24: note = Synthetic
  source 1..24: mol_type = other RNA
ggtcttccatgtcctcgtccgacg

SEQ ID NO: 18397 - RNA, 18 nt, synthetic construct
  misc_feature 1..18: note = Synthetic
  source 1..18: mol_type = other RNA
gtctgggtgctgggtacg

SEQ ID NO: 18398 - RNA, 19 nt, synthetic construct
  misc_feature 1..19: note = Synthetic
  source 1..19: mol_type = other RNA
cgtctgggtgctgggtacg

SEQ ID NO: 18399 - RNA, 20 nt, synthetic construct
  misc_feature 1..20: note = Synthetic
  source 1..20: mol_type = other RNA
gcgtctgggtgctgggtacg

SEQ ID NO: 18400 - RNA, 21 nt, synthetic construct
  misc_feature 1..21: note = Synthetic
  source 1..21: mol_type = other RNA
ggcgtctgggtgctgggtacg

SEQ ID NO: 18401 - RNA, 22 nt, synthetic construct
  misc_feature 1..22: note = Synthetic
  source 1..22: mol_type = other RNA
aggcgtctgggtgctgggtacg

SEQ ID NO: 18402 - RNA, 23 nt, synthetic construct
  misc_feature 1..23: note = Synthetic
  source 1..23: mol_type = other RNA
gaggcgtctgggtgctgggtacg

SEQ ID NO: 18403 - RNA, 24 nt, synthetic construct
  misc_feature 1..24: note = Synthetic
  source 1..24: mol_type = other RNA
cgaggcgtctgggtgctgggtacg

SEQ ID NO: 18404 - RNA, 18 nt, synthetic construct
  misc_feature 1..18: note = Synthetic
  source 1..18: mol_type = other RNA
gacgagacgggcggaccg

SEQ ID NO: 18405 - RNA, 19 nt, synthetic construct
  misc_feature 1..19: note = Synthetic
  source 1..19: mol_type = other RNA
ggacgagacgggcggaccg

SEQ ID NO: 18406 - RNA, 20 nt, synthetic construct
  misc_feature 1..20: note = Synthetic
  source 1..20: mol_type = other RNA
tggacgagacgggcggaccg

SEQ ID NO: 18407 - RNA, 21 nt, synthetic construct
  misc_feature 1..21: note = Synthetic
  source 1..21: mol_type = other RNA
ctggacgagacgggcggaccg

SEQ ID NO: 18408 - RNA, 22 nt, synthetic construct
  misc_feature 1..22: note = Synthetic
  source 1..22: mol_type = other RNA
tctggacgagacgggcggaccg

SEQ ID NO: 18409 - RNA, 23 nt, synthetic construct
  misc_feature 1..23: note = Synthetic
  source 1..23: mol_type = other RNA
ttctggacgagacgggcggaccg

SEQ ID NO: 18410 - RNA, 24 nt, synthetic construct
  misc_feature 1..24: note = Synthetic
  source 1..24: mol_type = other RNA
cttctggacgagacgggcggaccg

SEQ ID NO: 18411 - RNA, 18 nt, synthetic construct
  misc_feature 1..18: note = Synthetic
  source 1..18: mol_type = other RNA
ggttctgggggcacgccg

SEQ ID NO: 18412 - RNA, 19 nt, synthetic construct
  misc_feature 1..19: note = Synthetic
  source 1..19: mol_type = other RNA
tggttctgggggcacgccg

SEQ ID NO: 18413 - RNA, 20 nt, synthetic construct
  misc_feature 1..20: note = Synthetic
  source 1..20: mol_type = other RNA
ttggttctgggggcacgccg

SEQ ID NO: 18414 - RNA, 21 nt, synthetic construct
  misc_feature 1..21: note = Synthetic
  source 1..21: mol_type = other RNA
attggttctgggggcacgccg

SEQ ID NO: 18415 - RNA, 22 nt, synthetic construct
  misc_feature 1..22: note = Synthetic
  source 1..22: mol_type = other RNA
gattggttctgggggcacgccg

SEQ ID NO: 18416 - RNA, 23 nt, synthetic construct
  misc_feature 1..23: note = Synthetic
  source 1..23: mol_type = other RNA
cgattggttctgggggcacgccg

SEQ ID NO: 18417 - RNA, 24 nt, synthetic construct
  misc_feature 1..24: note = Synthetic
  source 1..24: mol_type = other RNA
gcgattggttctgggggcacgccg

SEQ ID NO: 18418 - RNA, 18 nt, synthetic construct
  misc_feature 1..18: note = Synthetic
  source 1..18: mol_type = other RNA
ccgggctgtcggctgccg

SEQ ID NO: 18419 - RNA, 19 nt, synthetic construct
  misc_feature 1..19: note = Synthetic
  source 1..19: mol_type = other RNA
accgggctgtcggctgccg

SEQ ID NO: 18420 - RNA, 20 nt, synthetic construct
  misc_feature 1..20: note = Synthetic
  source 1..20: mol_type = other RNA
gaccgggctgtcggctgccg

SEQ ID NO: 18421 - RNA, 21 nt, synthetic construct
  misc_feature 1..21: note = Synthetic
  source 1..21: mol_type = other RNA
tgaccgggctgtcggctgccg

SEQ ID NO: 18422 - RNA, 22 nt, synthetic construct
  misc_feature 1..22: note = Synthetic
  source 1..22: mol_type = other RNA
atgaccgggctgtcggctgccg

SEQ ID NO: 18423 - RNA, 23 nt, synthetic construct
  misc_feature 1..23: note = Synthetic
  source 1..23: mol_type = other RNA
catgaccgggctgtcggctgccg

SEQ ID NO: 18424 - RNA, 24 nt, synthetic construct
  misc_feature 1..24: note = Synthetic
  source 1..24: mol_type = other RNA
ccatgaccgggctgtcggctgccg

SEQ ID NO: 18425 - RNA, 18 nt, synthetic construct
  misc_feature 1..18: note = Synthetic
  source 1..18: mol_type = other RNA
tggggccctgccgctccg

SEQ ID NO: 18426 - RNA, 19 nt, synthetic construct
  misc_feature 1..19: note = Synthetic
  source 1..19: mol_type = other RNA
ttggggccctgccgctccg

SEQ ID NO: 18427 - RNA, 20 nt, synthetic construct
  misc_feature 1..20: note = Synthetic
  source 1..20: mol_type = other RNA
gttggggccctgccgctccg

SEQ ID NO: 18428 - RNA, 21 nt, synthetic construct
  misc_feature 1..21: note = Synthetic
  source 1..21: mol_type = other RNA
cgttggggccctgccgctccg

SEQ ID NO: 18429 - RNA, 22 nt, synthetic construct
  misc_feature 1..22: note = Synthetic
  source 1..22: mol_type = other RNA
tcgttggggccctgccgctccg

SEQ ID NO: 18430 - RNA, 23 nt, synthetic construct
  misc_feature 1..23: note = Synthetic
  source 1..23: mol_type = other RNA
atcgttggggccctgccgctccg

SEQ ID NO: 18431 - RNA, 24 nt, synthetic construct
  misc_feature 1..24: note = Synthetic
  source 1..24: mol_type = other RNA
gatcgttggggccctgccgctccg

SEQ ID NO: 18432 - RNA, 18 nt, synthetic construct
  misc_feature 1..18: note = Synthetic
  source 1..18: mol_type = other RNA
tccggtccgtcctctccg

SEQ ID NO: 18433 - RNA, 19 nt, synthetic construct
  misc_feature 1..19: note = Synthetic
  source 1..19: mol_type = other RNA
ctccggtccgtcctctccg

SEQ ID NO: 18434 - RNA, 21 nt, synthetic construct
  misc_feature 1..21: note = Synthetic
  source 1..21: mol_type = other RNA
ggctccggtccgtcctctccg

SEQ ID NO: 18435 - RNA, 22 nt, synthetic construct
  misc_feature 1..22: note = Synthetic
  source 1..22: mol_type = other RNA
cggctccggtccgtcctctccg

SEQ ID NO: 18436 - RNA, 23 nt, synthetic construct
  misc_feature 1..23: note = Synthetic
  source 1..23: mol_type = other RNA
tcggctccggtccgtcctctccg

SEQ ID NO: 18437 - RNA, 24 nt, synthetic construct
  misc_feature 1..24: note = Synthetic
  source 1..24: mol_type = other RNA
atcggctccggtccgtcctctccg

SEQ ID NO: 18438 - RNA, 18 nt, synthetic construct
  misc_feature 1..18: note = Synthetic
  source 1..18: mol_type = other RNA
cttccatgtcctcgtccg

SEQ ID NO: 18439 - RNA, 19 nt, synthetic construct
  misc_feature 1..19: note = Synthetic
  source 1..19: mol_type = other RNA
tcttccatgtcctcgtccg

SEQ ID NO: 18440 - RNA, 20 nt, synthetic construct
  misc_feature 1..20: note = Synthetic
  source 1..20: mol_type = other RNA
gtcttccatgtcctcgtccg

SEQ ID NO: 18441 - RNA, 21 nt, synthetic construct
  misc_feature 1..21: note = Synthetic
  source 1..21: mol_type = other RNA
ggtcttccatgtcctcgtccg

SEQ ID NO: 18442 - RNA, 22 nt, synthetic construct
  misc_feature 1..22: note = Synthetic
  source 1..22: mol_type = other RNA
gggtcttccatgtcctcgtccg

SEQ ID NO: 18443 - RNA, 23 nt, synthetic construct
  misc_feature 1..23: note = Synthetic
  source 1..23: mol_type = other RNA
ggggtcttccatgtcctcgtccg

SEQ ID NO: 18444 - RNA, 24 nt, synthetic construct
  misc_feature 1..24: note = Synthetic
  source 1..24: mol_type = other RNA
gggggtcttccatgtcctcgtccg

SEQ ID NO: 18445 - RNA, 18 nt, synthetic construct
  misc_feature 1..18: note = Synthetic
  source 1..18: mol_type = other RNA
ggcgctggttgaggatcg

SEQ ID NO: 18446 - RNA, 19 nt, synthetic construct
  misc_feature 1..19: note = Synthetic
  source 1..19: mol_type = other RNA
gggcgctggttgaggatcg

SEQ ID NO: 18447 - RNA, 20 nt, synthetic construct
  misc_feature 1..20: note = Synthetic
  source 1..20: mol_type = other RNA
ggggcgctggttgaggatcg

SEQ ID NO: 18448 - RNA, 21 nt, synthetic construct
  misc_feature 1..21: note = Synthetic
  source 1..21: mol_type = other RNA
tggggcgctggttgaggatcg

SEQ ID NO: 18449 - RNA, 22 nt, synthetic construct
  misc_feature 1..22: note = Synthetic
  source 1..22: mol_type = other RNA
gtggggcgctggttgaggatcg

SEQ ID NO: 18450 - RNA, 23 nt, synthetic construct
  misc_feature 1..23: note = Synthetic
  source 1..23: mol_type = other RNA
tgtggggcgctggttgaggatcg

SEQ ID NO: 18451 - RNA, 24 nt, synthetic construct
  misc_feature 1..24: note = Synthetic
  source 1..24: mol_type = other RNA
ctgtggggcgctggttgaggatcg

SEQ ID NO: 18452 - RNA, 18 nt, synthetic construct
  misc_feature 1..18: note = Synthetic
  source 1..18: mol_type = other RNA
cggctctccgccggctcg

SEQ ID NO: 18453 - RNA, 19 nt, synthetic construct
  misc_feature 1..19: note = Synthetic
  source 1..19: mol_type = other RNA
gcggctctccgccggctcg

SEQ ID NO: 18454 - RNA, 21 nt, synthetic construct
  misc_feature 1..21: note = Synthetic
  source 1..21: mol_type = other RNA
cggcggctctccgccggctcg

SEQ ID NO: 18455 - RNA, 22 nt, synthetic construct
  misc_feature 1..22: note = Synthetic
  source 1..22: mol_type = other RNA
gcggcggctctccgccggctcg

SEQ ID NO: 18456 - RNA, 23 nt, synthetic construct
  misc_feature 1..23: note = Synthetic
  source 1..23: mol_type = other RNA
cgcggcggctctccgccggctcg

SEQ ID NO: 18457 - RNA, 24 nt, synthetic construct
  misc_feature 1..24: note = Synthetic
  source 1..24: mol_type = other RNA
tcgcggcggctctccgccggctcg

SEQ ID NO: 18458 - RNA, 18 nt, synthetic construct
  misc_feature 1..18: note = Synthetic
  source 1..18: mol_type = other RNA
ttgcccccgtgctgctcg

SEQ ID NO: 18459 - RNA, 19 nt, synthetic construct
  misc_feature 1..19: note = Synthetic
  source 1..19: mol_type = other RNA
cttgcccccgtgctgctcg

SEQ ID NO: 18460 - RNA, 21 nt, synthetic construct
  misc_feature 1..21: note = Synthetic
  source 1..21: mol_type = other RNA
accttgcccccgtgctgctcg

SEQ ID NO: 18461 - RNA, 22 nt, synthetic construct
  misc_feature 1..22: note = Synthetic
  source 1..22: mol_type = other RNA
caccttgcccccgtgctgctcg

SEQ ID NO: 18462 - RNA, 23 nt, synthetic construct
  misc_feature 1..23: note = Synthetic
  source 1..23: mol_type = other RNA
ccaccttgcccccgtgctgctcg

SEQ ID NO: 18463 - RNA, 24 nt, synthetic construct
  misc_feature 1..24: note = Synthetic
  source 1..24: mol_type = other RNA
gccaccttgcccccgtgctgctcg

SEQ ID NO: 18464 - RNA, 18 nt, synthetic construct
  misc_feature 1..18: note = Synthetic
  source 1..18: mol_type = other RNA
gggggagcaagacggtcg

SEQ ID NO: 18465 - RNA, 19 nt, synthetic construct
  misc_feature 1..19: note = Synthetic
  source 1..19: mol_type = other RNA
cgggggagcaagacggtcg

SEQ ID NO: 18466 - RNA, 20 nt, synthetic construct
  misc_feature 1..20: note = Synthetic
  source 1..20: mol_type = other RNA
tcgggggagcaagacggtcg

SEQ ID NO: 18467 - RNA, 21 nt, synthetic construct
  misc_feature 1..21: note = Synthetic
  source 1..21: mol_type = other RNA
ctcgggggagcaagacggtcg

SEQ ID NO: 18468 - RNA, 22 nt, synthetic construct
  misc_feature 1..22: note = Synthetic
  source 1..22: mol_type = other RNA
gctcgggggagcaagacggtcg

SEQ ID NO: 18469 - RNA, 23 nt, synthetic construct
  misc_feature 1..23: note = Synthetic
  source 1..23: mol_type = other RNA
tgctcgggggagcaagacggtcg

SEQ ID NO: 18470 - RNA, 24 nt, synthetic construct
  misc_feature 1..24: note = Synthetic
  source 1..24: mol_type = other RNA
ctgctcgggggagcaagacggtcg

SEQ ID NO: 18471 - RNA, 18 nt, synthetic construct
  misc_feature 1..18: note = Synthetic
  source 1..18: mol_type = other RNA
caggctgggctttggtcg

SEQ ID NO: 18472 - RNA, 19 nt, synthetic construct
  misc_feature 1..19: note = Synthetic
  source 1..19: mol_type = other RNA
gcaggctgggctttggtcg

SEQ ID NO: 18473 - RNA, 20 nt, synthetic construct
  misc_feature 1..20: note = Synthetic
  source 1..20: mol_type = other RNA
ggcaggctgggctttggtcg

SEQ ID NO: 18474 - RNA, 21 nt, synthetic construct
  misc_feature 1..21: note = Synthetic
  source 1..21: mol_type = other RNA
gggcaggctgggctttggtcg

SEQ ID NO: 18475 - RNA, 22 nt, synthetic construct
  misc_feature 1..22: note = Synthetic
  source 1..22: mol_type = other RNA
cgggcaggctgggctttggtcg

SEQ ID NO: 18476 - RNA, 23 nt, synthetic construct
  misc_feature 1..23: note = Synthetic
  source 1..23: mol_type = other RNA
gcgggcaggctgggctttggtcg

SEQ ID NO: 18477 - RNA, 24 nt, synthetic construct
  misc_feature 1..24: note = Synthetic
  source 1..24: mol_type = other RNA
cgcgggcaggctgggctttggtcg

SEQ ID NO: 18478 - RNA, 18 nt, synthetic construct
  misc_feature 1..18: note = Synthetic
  source 1..18: mol_type = other RNA
tcgtccagatcgctgtcg

SEQ ID NO: 18479 - RNA, 19 nt, synthetic construct
  misc_feature 1..19: note = Synthetic
  source 1..19: mol_type = other RNA
ctcgtccagatcgctgtcg

SEQ ID NO: 18480 - RNA, 20 nt, synthetic construct
  misc_feature 1..20: note = Synthetic
  source 1..20: mol_type = other RNA
cctcgtccagatcgctgtcg

SEQ ID NO: 18481 - RNA, 21 nt, synthetic construct
  misc_feature 1..21: note = Synthetic
  source 1..21: mol_type = other RNA
tcctcgtccagatcgctgtcg

SEQ ID NO: 18482 - RNA, 22 nt, synthetic construct
  misc_feature 1..22: note = Synthetic
  source 1..22: mol_type = other RNA
gtcctcgtccagatcgctgtcg

SEQ ID NO: 18483 - RNA, 23 nt, synthetic construct
  misc_feature 1..23: note = Synthetic
  source 1..23: mol_type = other RNA
ggtcctcgtccagatcgctgtcg

SEQ ID NO: 18484 - RNA, 24 nt, synthetic construct
  misc_feature 1..24: note = Synthetic
  source 1..24: mol_type = other RNA
gggtcctcgtccagatcgctgtcg

SEQ ID NO: 18485 - RNA, 18 nt, synthetic construct
  misc_feature 1..18: note = Synthetic
  source 1..18: mol_type = other RNA
ctgtcggagaggtccagg

SEQ ID NO: 18486 - RNA, 19 nt, synthetic construct
  misc_feature 1..19: note = Synthetic
  source 1..19: mol_type = other RNA
gctgtcggagaggtccagg

SEQ ID NO: 18487 - RNA, 20 nt, synthetic construct
  misc_feature 1..20: note = Synthetic
  source 1..20: mol_type = other RNA
cgctgtcggagaggtccagg

SEQ ID NO: 18488 - RNA, 21 nt, synthetic construct
  misc_feature 1..21: note = Synthetic
  source 1..21: mol_type = other RNA
tcgctgtcggagaggtccagg

SEQ ID NO: 18489 - RNA, 22 nt, synthetic construct
  misc_feature 1..22: note = Synthetic
  source 1..22: mol_type = other RNA
atcgctgtcggagaggtccagg

SEQ ID NO: 18490 - RNA, 23 nt, synthetic construct
  misc_feature 1..23: note = Synthetic
  source 1..23: mol_type = other RNA
gatcgctgtcggagaggtccagg

SEQ ID NO: 18491 - RNA, 24 nt, synthetic construct
  misc_feature 1..24: note = Synthetic
  source 1..24: mol_type = other RNA
agatcgctgtcggagaggtccagg

SEQ ID NO: 18492 - RNA, 18 nt, synthetic construct
  misc_feature 1..18: note = Synthetic
  source 1..18: mol_type = other RNA
gcgtccgccgcgggcagg

SEQ ID NO: 18493 - RNA, 19 nt, synthetic construct
  misc_feature 1..19: note = Synthetic
  source 1..19: mol_type = other RNA
ggcgtccgccgcgggcagg

SEQ ID NO: 18494 - RNA, 20 nt, synthetic construct
  misc_feature 1..20: note = Synthetic
  source 1..20: mol_type = other RNA
cggcgtccgccgcgggcagg

SEQ ID NO: 18495 - RNA, 21 nt, synthetic construct
  misc_feature 1..21: note = Synthetic
  source 1..21: mol_type = other RNA
acggcgtccgccgcgggcagg

SEQ ID NO: 18496 - RNA, 22 nt, synthetic construct
  misc_feature 1..22: note = Synthetic
  source 1..22: mol_type = other RNA
cacggcgtccgccgcgggcagg

SEQ ID NO: 18497 - RNA, 23 nt, synthetic construct
  misc_feature 1..23: note = Synthetic
  source 1..23: mol_type = other RNA
ccacggcgtccgccgcgggcagg

SEQ ID NO: 18498 - RNA, 24 nt, synthetic construct
  misc_feature 1..24: note = Synthetic
  source 1..24: mol_type = other RNA
cccacggcgtccgccgcgggcagg

SEQ ID NO: 18499 - RNA, 18 nt, synthetic construct
  misc_feature 1..18: note = Synthetic
  source 1..18: mol_type = other RNA
gtcttctggacgagacgg

SEQ ID NO: 18500 - RNA, 19 nt, synthetic construct
  misc_feature 1..19: note = Synthetic
  source 1..19: mol_type = other RNA
ggtcttctggacgagacgg

SEQ ID NO: 18501 - RNA, 20 nt, synthetic construct
  misc_feature 1..20: note = Synthetic
  source 1..20: mol_type = other RNA
gggtcttctggacgagacgg

SEQ ID NO: 18502 - RNA, 21 nt, synthetic construct
  misc_feature 1..21: note = Synthetic
  source 1..21: mol_type = other RNA
ggggtcttctggacgagacgg

SEQ ID NO: 18503 - RNA, 22 nt, synthetic construct
  misc_feature 1..22: note = Synthetic
  source 1..22: mol_type = other RNA
cggggtcttctggacgagacgg

SEQ ID NO: 18504 - RNA, 23 nt, synthetic construct
  misc_feature 1..23: note = Synthetic
  source 1..23: mol_type = other RNA
ccggggtcttctggacgagacgg

SEQ ID NO: 18505 - RNA, 24 nt, synthetic construct
  misc_feature 1..24: note = Synthetic
  source 1..24: mol_type = other RNA
gccggggtcttctggacgagacgg

SEQ ID NO: 18506 - RNA, 18 nt, synthetic construct
  misc_feature 1..18: note = Synthetic
  source 1..18: mol_type = other RNA
gttctgggggcacgccgg

SEQ ID NO: 18507 - RNA, 19 nt, synthetic construct
  misc_feature 1..19: note = Synthetic
  source 1..19: mol_type = other RNA
ggttctgggggcacgccgg

SEQ ID NO: 18508 - RNA, 21 nt, synthetic construct
  misc_feature 1..21: note = Synthetic
  source 1..21: mol_type = other RNA
ttggttctgggggcacgccgg

SEQ ID NO: 18509 - RNA, 22 nt, synthetic construct
  misc_feature 1..22: note = Synthetic
  source 1..22: mol_type = other RNA
attggttctgggggcacgccgg

SEQ ID NO: 18510 - RNA, 23 nt, synthetic construct
  misc_feature 1..23: note = Synthetic
  source 1..23: mol_type = other RNA
gattggttctgggggcacgccgg

SEQ ID NO: 18511 - RNA, 24 nt, synthetic construct
  misc_feature 1..24: note = Synthetic
  source 1..24: mol_type = other RNA
cgattggttctgggggcacgccgg

SEQ ID NO: 18512 - RNA, 18 nt, synthetic construct
  misc_feature 1..18: note = Synthetic
  source 1..18: mol_type = other RNA
agacgggcggaccgccgg

SEQ ID NO: 18513 - RNA, 19 nt, synthetic construct
  misc_feature 1..19: note = Synthetic
  source 1..19: mol_type = other RNA
gagacgggcggaccgccgg

SEQ ID NO: 18514 - RNA, 20 nt, synthetic construct
  misc_feature 1..20: note = Synthetic
  source 1..20: mol_type = other RNA
cgagacgggcggaccgccgg

SEQ ID NO: 18515 - RNA, 21 nt, synthetic construct
  misc_feature 1..21: note = Synthetic
  source 1..21: mol_type = other RNA
acgagacgggcggaccgccgg

SEQ ID NO: 18516 - RNA, 22 nt, synthetic construct
  misc_feature 1..22: note = Synthetic
  source 1..22: mol_type = other RNA
gacgagacgggcggaccgccgg

SEQ ID NO: 18517 - RNA, 23 nt, synthetic construct
  misc_feature 1..23: note = Synthetic
  source 1..23: mol_type = other RNA
ggacgagacgggcggaccgccgg

SEQ ID NO: 18518 - RNA, 24 nt, synthetic construct
  misc_feature 1..24: note = Synthetic
  source 1..24: mol_type = other RNA
tggacgagacgggcggaccgccgg

SEQ ID NO: 18519 - RNA, 18 nt, synthetic construct
  misc_feature 1..18: note = Synthetic
  source 1..18: mol_type = other RNA
tgcccccgtgctgctcgg

SEQ ID NO: 18520 - RNA, 19 nt, synthetic construct
  misc_feature 1..19: note = Synthetic
  source 1..19: mol_type = other RNA
ttgcccccgtgctgctcgg

SEQ ID NO: 18521 - RNA, 21 nt, synthetic construct
  misc_feature 1..21: note = Synthetic
  source 1..21: mol_type = other RNA
ccttgcccccgtgctgctcgg

SEQ ID NO: 18522 - RNA, 22 nt, synthetic construct
  misc_feature 1..22: note = Synthetic
  source 1..22: mol_type = other RNA
accttgcccccgtgctgctcgg

SEQ ID NO: 18523 - RNA, 23 nt, synthetic construct
  misc_feature 1..23: note = Synthetic
  source 1..23: mol_type = other RNA
caccttgcccccgtgctgctcgg

SEQ ID NO: 18524 - RNA, 24 nt, synthetic construct
  misc_feature 1..24: note = Synthetic
  source 1..24: mol_type = other RNA
ccaccttgcccccgtgctgctcgg

SEQ ID NO: 18525 - RNA, 18 nt, synthetic construct
  misc_feature 1..18: note = Synthetic
  source 1..18: mol_type = other RNA
gccctgccgctccgtcgg

SEQ ID NO: 18526 - RNA, 19 nt, synthetic construct
  misc_feature 1..19: note = Synthetic
  source 1..19: mol_type = other RNA
ggccctgccgctccgtcgg

SEQ ID NO: 18527 - RNA, 20 nt, synthetic construct
  misc_feature 1..20: note = Synthetic
  source 1..20: mol_type = other RNA
gggccctgccgctccgtcgg

SEQ ID NO: 18528 - RNA, 21 nt, synthetic construct
  misc_feature 1..21: note = Synthetic
  source 1..21: mol_type = other RNA
ggggccctgccgctccgtcgg

SEQ ID NO: 18529 - RNA, 22 nt, synthetic construct
  misc_feature 1..22: note = Synthetic
  source 1..22: mol_type = other RNA
tggggccctgccgctccgtcgg

SEQ ID NO: 18530 - RNA, 23 nt, synthetic construct
  misc_feature 1..23: note = Synthetic
  source 1..23: mol_type = other RNA
ttggggccctgccgctccgtcgg

SEQ ID NO: 18531 - RNA, 24 nt, synthetic construct
  misc_feature 1..24: note = Synthetic
  source 1..24: mol_type = other RNA
gttggggccctgccgctccgtcgg

SEQ ID NO: 18532 - RNA, 18 nt, synthetic construct
  misc_feature 1..18: note = Synthetic
  source 1..18: mol_type = other RNA
aggctgggctttggtcgg

SEQ ID NO: 18533 - RNA, 19 nt, synthetic construct
  misc_feature 1..19: note = Synthetic
  source 1..19: mol_type = other RNA
caggctgggctttggtcgg

SEQ ID NO: 18534 - RNA, 21 nt, synthetic construct
  misc_feature 1..21: note = Synthetic
  source 1..21: mol_type = other RNA
ggcaggctgggctttggtcgg

SEQ ID NO: 18535 - RNA, 22 nt, synthetic construct
  misc_feature 1..22: note = Synthetic
  source 1..22: mol_type = other RNA
gggcaggctgggctttggtcgg

SEQ ID NO: 18536 - RNA, 23 nt, synthetic construct
  misc_feature 1..23: note = Synthetic
  source 1..23: mol_type = other RNA
cgggcaggctgggctttggtcgg

SEQ ID NO: 18537 - RNA, 24 nt, synthetic construct
  misc_feature 1..24: note = Synthetic
  source 1..24: mol_type = other RNA
gcgggcaggctgggctttggtcgg

SEQ ID NO: 18538 - RNA, 18 nt, synthetic construct
  misc_feature 1..18: note = Synthetic
  source 1..18: mol_type = other RNA
ggctttggtcggtggggg

SEQ ID NO: 18539 - RNA, 19 nt, synthetic construct
  misc_feature 1..19: note = Synthetic
  source 1..19: mol_type = other RNA
gggctttggtcggtggggg

SEQ ID NO: 18540 - RNA, 20 nt, synthetic construct
  misc_feature 1..20: note = Synthetic
  source 1..20: mol_type = other RNA
tgggctttggtcggtggggg

SEQ ID NO: 18541 - RNA, 21 nt, synthetic construct
  misc_feature 1..21: note = Synthetic
  source 1..21: mol_type = other RNA
ctgggctttggtcggtggggg

SEQ ID NO: 18542 - RNA, 22 nt, synthetic construct
  misc_feature 1..22: note = Synthetic
  source 1..22: mol_type = other RNA
gctgggctttggtcggtggggg

SEQ ID NO: 18543 - RNA, 23 nt, synthetic construct
  misc_feature 1..23: note = Synthetic
  source 1..23: mol_type = other RNA
ggctgggctttggtcggtggggg

SEQ ID NO: 18544 - RNA, 24 nt, synthetic construct
  misc_feature 1..24: note = Synthetic
  source 1..24: mol_type = other RNA
aggctgggctttggtcggtggggg

SEQ ID NO: 18545 - RNA, 18 nt, synthetic construct
  misc_feature 1..18: note = Synthetic
  source 1..18: mol_type = other RNA
cacactgtggggcgctgg

SEQ ID NO: 18546 - RNA, 19 nt, synthetic construct
  misc_feature 1..19: note = Synthetic
  source 1..19: mol_type = other RNA
acacactgtggggcgctgg

SEQ ID NO: 18547 - RNA, 20 nt, synthetic construct
  misc_feature 1..20: note = Synthetic
  source 1..20: mol_type = other RNA
cacacactgtggggcgctgg

SEQ ID NO: 18548 - RNA, 21 nt, synthetic construct
  misc_feature 1..21: note = Synthetic
  source 1..21: mol_type = other RNA
ccacacactgtggggcgctgg

SEQ ID NO: 18549 - RNA, 22 nt, synthetic construct
  misc_feature 1..22: note = Synthetic
  source 1..22: mol_type = other RNA
accacacactgtggggcgctgg

SEQ ID NO: 18550 - RNA, 23 nt, synthetic construct
  misc_feature 1..23: note = Synthetic
  source 1..23: mol_type = other RNA
gaccacacactgtggggcgctgg

SEQ ID NO: 18551 - RNA, 24 nt, synthetic construct
  misc_feature 1..24: note = Synthetic
  source 1..24: mol_type = other RNA
cgaccacacactgtggggcgctgg

SEQ ID NO: 18552 - RNA, 18 nt, synthetic construct
  misc_feature 1..18: note = Synthetic
  source 1..18: mol_type = other RNA
tacgccggggtcttctgg

SEQ ID NO: 18553 - RNA, 19 nt, synthetic construct
  misc_feature 1..19: note = Synthetic
  source 1..19: mol_type = other RNA
gtacgccggggtcttctgg

SEQ ID NO: 18554 - RNA, 20 nt, synthetic construct
  misc_feature 1..20: note = Synthetic
  source 1..20: mol_type = other RNA
ggtacgccggggtcttctgg

SEQ ID NO: 18555 - RNA, 21 nt, synthetic construct
  misc_feature 1..21: note = Synthetic
  source 1..21: mol_type = other RNA
gggtacgccggggtcttctgg

SEQ ID NO: 18556 - RNA, 22 nt, synthetic construct
  misc_feature 1..22: note = Synthetic
  source 1..22: mol_type = other RNA
tgggtacgccggggtcttctgg

SEQ ID NO: 18557 - RNA, 23 nt, synthetic construct
  misc_feature 1..23: note = Synthetic
  source 1..23: mol_type = other RNA
ctgggtacgccggggtcttctgg

SEQ ID NO: 18558 - RNA, 24 nt, synthetic construct
  misc_feature 1..24: note = Synthetic
  source 1..24: mol_type = other RNA
gctgggtacgccggggtcttctgg

SEQ ID NO: 18559 - RNA, 18 nt, synthetic construct
  misc_feature 1..18: note = Synthetic
  source 1..18: mol_type = other RNA
aggcgcgaccacacactg

SEQ ID NO: 18560 - RNA, 19 nt, synthetic construct
  misc_feature 1..19: note = Synthetic
  source 1..19: mol_type = other RNA
gaggcgcgaccacacactg

SEQ ID NO: 18561 - RNA, 21 nt, synthetic construct
  misc_feature 1..21: note = Synthetic
  source 1..21: mol_type = other RNA
ccgaggcgcgaccacacactg

SEQ ID NO: 18562 - RNA, 22 nt, synthetic construct
  misc_feature 1..22: note = Synthetic
  source 1..22: mol_type = other RNA
cccgaggcgcgaccacacactg

SEQ ID NO: 18563 - RNA, 23 nt, synthetic construct
  misc_feature 1..23: note = Synthetic
  source 1..23: mol_type = other RNA
ccccgaggcgcgaccacacactg

SEQ ID NO: 18564 - RNA, 24 nt, synthetic construct
  misc_feature 1..24: note = Synthetic
  source 1..24: mol_type = other RNA
gccccgaggcgcgaccacacactg

SEQ ID NO: 18565 - RNA, 18 nt, synthetic construct
  misc_feature 1..18: note = Synthetic
  source 1..18: mol_type = other RNA
tcctcgtccagatcgctg

SEQ ID NO: 18566 - RNA, 19 nt, synthetic construct
  misc_feature 1..19: note = Synthetic
  source 1..19: mol_type = other RNA
gtcctcgtccagatcgctg

SEQ ID NO: 18567 - RNA, 20 nt, synthetic construct
  misc_feature 1..20: note = Synthetic
  source 1..20: mol_type = other RNA
ggtcctcgtccagatcgctg

SEQ ID NO: 18568 - RNA, 21 nt, synthetic construct
  misc_feature 1..21: note = Synthetic
  source 1..21: mol_type = other RNA
gggtcctcgtccagatcgctg

SEQ ID NO: 18569 - RNA, 22 nt, synthetic construct
  misc_feature 1..22: note = Synthetic
  source 1..22: mol_type = other RNA
ggggtcctcgtccagatcgctg

SEQ ID NO: 18570 - RNA, 23 nt, synthetic construct
  misc_feature 1..23: note = Synthetic
  source 1..23: mol_type = other RNA
gggggtcctcgtccagatcgctg

SEQ ID NO: 18571 - RNA, 24 nt, synthetic construct
  misc_feature 1..24: note = Synthetic
  source 1..24: mol_type = other RNA
ggggggtcctcgtccagatcgctg

SEQ ID NO: 18572 - RNA, 18 nt, synthetic construct
  misc_feature 1..18: note = Synthetic
  source 1..18: mol_type = other RNA
gaggcgcgaccacacact

SEQ ID NO: 18573 - RNA, 19 nt, synthetic construct
  misc_feature 1..19: note = Synthetic
  source 1..19: mol_type = other RNA
cgaggcgcgaccacacact

SEQ ID NO: 18574 - RNA, 20 nt, synthetic construct
  misc_feature 1..20: note = Synthetic
  source 1..20: mol_type = other RNA
ccgaggcgcgaccacacact

SEQ ID NO: 18575 - RNA, 21 nt, synthetic construct
  misc_feature 1..21: note = Synthetic
  source 1..21: mol_type = other RNA
cccgaggcgcgaccacacact

SEQ ID NO: 18576 - RNA, 22 nt, synthetic construct
  misc_feature 1..22: note = Synthetic
  source 1..22: mol_type = other RNA
ccccgaggcgcgaccacacact

SEQ ID NO: 18577 - RNA, 23 nt, synthetic construct
  misc_feature 1..23: note = Synthetic
  source 1..23: mol_type = other RNA
gccccgaggcgcgaccacacact

SEQ ID NO: 18578 - RNA, 24 nt, synthetic construct
  misc_feature 1..24: note = Synthetic
  source 1..24: mol_type = other RNA
ggccccgaggcgcgaccacacact

SEQ ID NO: 18579 - RNA, 18 nt, synthetic construct
  misc_feature 1..18: note = Synthetic
  source 1..18: mol_type = other RNA
ggcggctctccgccggct

SEQ ID NO: 18580 - RNA, 19 nt, synthetic construct
  misc_feature 1..19: note = Synthetic
  source 1..19: mol_type = other RNA
cggcggctctccgccggct

SEQ ID NO: 18581 - RNA, 21 nt, synthetic construct
  misc_feature 1..21: note = Synthetic
  source 1..21: mol_type = other RNA
cgcggcggctctccgccggct

SEQ ID NO: 18582 - RNA, 22 nt, synthetic construct
  misc_feature 1..22: note = Synthetic
  source 1..22: mol_type = other RNA
tcgcggcggctctccgccggct

SEQ ID NO: 18583 - RNA, 23 nt, synthetic construct
  misc_feature 1..23: note = Synthetic
  source 1..23: mol_type = other RNA
gtcgcggcggctctccgccggct

SEQ ID NO: 18584 - RNA, 24 nt, synthetic construct
  misc_feature 1..24: note = Synthetic
  source 1..24: mol_type = other RNA
cgtcgcggcggctctccgccggct

SEQ ID NO: 18585 - RNA, 18 nt, synthetic construct
  misc_feature 1..18: note = Synthetic
  source 1..18: mol_type = other RNA
ccttgcccccgtgctgct

SEQ ID NO: 18586 - RNA, 19 nt, synthetic construct
  misc_feature 1..19: note = Synthetic
  source 1..19: mol_type = other RNA
accttgcccccgtgctgct

SEQ ID NO: 18587 - RNA, 21 nt, synthetic construct
  misc_feature 1..21: note = Synthetic
  source 1..21: mol_type = other RNA
ccaccttgcccccgtgctgct

SEQ ID NO: 18588 - RNA, 22 nt, synthetic construct
  misc_feature 1..22: note = Synthetic
  source 1..22: mol_type = other RNA
gccaccttgcccccgtgctgct

SEQ ID NO: 18589 - RNA, 23 nt, synthetic construct
  misc_feature 1..23: note = Synthetic
  source 1..23: mol_type = other RNA
ggccaccttgcccccgtgctgct

SEQ ID NO: 18590 - RNA, 24 nt, synthetic construct
  misc_feature 1..24: note = Synthetic
  source 1..24: mol_type = other RNA
gggccaccttgcccccgtgctgct

SEQ ID NO: 18591 - RNA, 18 nt, synthetic construct
  misc_feature 1..18: note = Synthetic
  source 1..18: mol_type = other RNA
agggttgcgattggttct

SEQ ID NO: 18592 - RNA, 19 nt, synthetic construct
  misc_feature 1..19: note = Synthetic
  source 1..19: mol_type = other RNA
cagggttgcgattggttct

SEQ ID NO: 18593 - RNA, 21 nt, synthetic construct
  misc_feature 1..21: note = Synthetic
  source 1..21: mol_type = other RNA
cccagggttgcgattggttct

SEQ ID NO: 18594 - RNA, 22 nt, synthetic construct
  misc_feature 1..22: note = Synthetic
  source 1..22: mol_type = other RNA
ccccagggttgcgattggttct

SEQ ID NO: 18595 - RNA, 23 nt, synthetic construct
  misc_feature 1..23: note = Synthetic
  source 1..23: mol_type = other RNA
cccccagggttgcgattggttct

SEQ ID NO: 18596 - RNA, 24 nt, synthetic construct
  misc_feature 1..24: note = Synthetic
  source 1..24: mol_type = other RNA
tcccccagggttgcgattggttct

SEQ ID NO: 18597 - RNA, 18 nt, synthetic construct
  misc_feature 1..18: note = Synthetic
  source 1..18: mol_type = other RNA
cgggctgtcggctgccgt

SEQ ID NO: 18598 - RNA, 19 nt, synthetic construct
  misc_feature 1..19: note = Synthetic
  source 1..19: mol_type = other RNA
ccgggctgtcggctgccgt

SEQ ID NO: 18599 - RNA, 21 nt, synthetic construct
  misc_feature 1..21: note = Synthetic
  source 1..21: mol_type = other RNA
gaccgggctgtcggctgccgt

SEQ ID NO: 18600 - RNA, 22 nt, synthetic construct
  misc_feature 1..22: note = Synthetic
  source 1..22: mol_type = other RNA
tgaccgggctgtcggctgccgt

SEQ ID NO: 18601 - RNA, 23 nt, synthetic construct
  misc_feature 1..23: note = Synthetic
  source 1..23: mol_type = other RNA
atgaccgggctgtcggctgccgt

SEQ ID NO: 18602 - RNA, 24 nt, synthetic construct
  misc_feature 1..24: note = Synthetic
  source 1..24: mol_type = other RNA
catgaccgggctgtcggctgccgt

SEQ ID NO: 18603 - RNA, 18 nt, synthetic construct
  misc_feature 1..18: note = Synthetic
  source 1..18: mol_type = other RNA
gcgctggttgaggatcgt

SEQ ID NO: 18604 - RNA, 19 nt, synthetic construct
  misc_feature 1..19: note = Synthetic
  source 1..19: mol_type = other RNA
ggcgctggttgaggatcgt

SEQ ID NO: 18605 - RNA, 21 nt, synthetic construct
  misc_feature 1..21: note = Synthetic
  source 1..21: mol_type = other RNA
ggggcgctggttgaggatcgt

SEQ ID NO: 18606 - RNA, 22 nt, synthetic construct
  misc_feature 1..22: note = Synthetic
  source 1..22: mol_type = other RNA
tggggcgctggttgaggatcgt

SEQ ID NO: 18607 - RNA, 23 nt, synthetic construct
  misc_feature 1..23: note = Synthetic
  source 1..23: mol_type = other RNA
gtggggcgctggttgaggatcgt

SEQ ID NO: 18608 - RNA, 24 nt, synthetic construct
  misc_feature 1..24: note = Synthetic
  source 1..24: mol_type = other RNA
tgtggggcgctggttgaggatcgt

SEQ ID NO: 18609 - RNA, 18 nt, synthetic construct
  misc_feature 1..18: note = Synthetic
  source 1..18: mol_type = other RNA
gctttggtcggtgggggt

SEQ ID NO: 18610 - RNA, 19 nt, synthetic construct
  misc_feature 1..19: note = Synthetic
  source 1..19: mol_type = other RNA
ggctttggtcggtgggggt

SEQ ID NO: 18611 - RNA, 21 nt, synthetic construct
  misc_feature 1..21: note = Synthetic
  source 1..21: mol_type = other RNA
tgggctttggtcggtgggggt

SEQ ID NO: 18612 - RNA, 22 nt, synthetic construct
  misc_feature 1..22: note = Synthetic
  source 1..22: mol_type = other RNA
ctgggctttggtcggtgggggt

SEQ ID NO: 18613 - RNA, 23 nt, synthetic construct
  misc_feature 1..23: note = Synthetic
  source 1..23: mol_type = other RNA
gctgggctttggtcggtgggggt

SEQ ID NO: 18614 - RNA, 24 nt, synthetic construct
  misc_feature 1..24: note = Synthetic
  source 1..24: mol_type = other RNA
ggctgggctttggtcggtgggggt

SEQ ID NO: 18615 - RNA, 18 nt, synthetic construct
  misc_feature 1..18: note = Synthetic
  source 1..18: mol_type = other RNA
cctcgtccagatcgctgt

SEQ ID NO: 18616 - RNA, 19 nt, synthetic construct
  misc_feature 1..19: note = Synthetic
  source 1..19: mol_type = other RNA
tcctcgtccagatcgctgt

SEQ ID NO: 18617 - RNA, 21 nt, synthetic construct
  misc_feature 1..21: note = Synthetic
  source 1..21: mol_type = other RNA
ggtcctcgtccagatcgctgt

SEQ ID NO: 18618 - RNA, 22 nt, synthetic construct
  misc_feature 1..22: note = Synthetic
  source 1..22: mol_type = other RNA
gggtcctcgtccagatcgctgt

SEQ ID NO: 18619 - RNA, 23 nt, synthetic construct
  misc_feature 1..23: note = Synthetic
  source 1..23: mol_type = other RNA
ggggtcctcgtccagatcgctgt

SEQ ID NO: 18620 - RNA, 24 nt, synthetic construct
  misc_feature 1..24: note = Synthetic
  source 1..24: mol_type = other RNA
gggggtcctcgtccagatcgctgt

SEQ ID NO: 18621 - RNA, 18 nt, synthetic construct
  misc_feature 1..18: note = Synthetic
  source 1..18: mol_type = other RNA
tgggtacgccggggtctt

SEQ ID NO: 18622 - RNA, 19 nt, synthetic construct
  misc_feature 1..19: note = Synthetic
  source 1..19: mol_type = other RNA
ctgggtacgccggggtctt

SEQ ID NO: 18623 - RNA, 20 nt, synthetic construct
  misc_feature 1..20: note = Synthetic
  source 1..20: mol_type = other RNA
gctgggtacgccggggtctt

SEQ ID NO: 18624 - RNA, 21 nt, synthetic construct
  misc_feature 1..21: note = Synthetic
  source 1..21: mol_type = other RNA
tgctgggtacgccggggtctt

SEQ ID NO: 18625 - RNA, 22 nt, synthetic construct
  misc_feature 1..22: note = Synthetic
  source 1..22: mol_type = other RNA
gtgctgggtacgccggggtctt

SEQ ID NO: 18626 - RNA, 23 nt, synthetic construct
  misc_feature 1..23: note = Synthetic
  source 1..23: mol_type = other RNA
ggtgctgggtacgccggggtctt

SEQ ID NO: 18627 - RNA, 24 nt, synthetic construct
  misc_feature 1..24: note = Synthetic
  source 1..24: mol_type = other RNA
gggtgctgggtacgccggggtctt

SEQ ID NO: 18628 - RNA, 18 nt, synthetic construct
  misc_feature 1..18: note = Synthetic
  source 1..18: mol_type = other RNA
ccagggttgcgattggtt

SEQ ID NO: 18629 - RNA, 19 nt, synthetic construct
  misc_feature 1..19: note = Synthetic
  source 1..19: mol_type = other RNA
cccagggttgcgattggtt

SEQ ID NO: 18630 - RNA, 20 nt, synthetic construct
  misc_feature 1..20: note = Synthetic
  source 1..20: mol_type = other RNA
ccccagggttgcgattggtt

SEQ ID NO: 18631 - RNA, 21 nt, synthetic construct
  misc_feature 1..21: note = Synthetic
  source 1..21: mol_type = other RNA
cccccagggttgcgattggtt

SEQ ID NO: 18632 - RNA, 22 nt, synthetic construct
  misc_feature 1..22: note = Synthetic
  source 1..22: mol_type = other RNA
tcccccagggttgcgattggtt

SEQ ID NO: 18633 - RNA, 23 nt, synthetic construct
  misc_feature 1..23: note = Synthetic
  source 1..23: mol_type = other RNA
gtcccccagggttgcgattggtt

SEQ ID NO: 18634 - RNA, 24 nt, synthetic construct
  misc_feature 1..24: note = Synthetic
  source 1..24: mol_type = other RNA
ggtcccccagggttgcgattggtt

SEQ ID NO: 18635 - RNA, 18 nt, synthetic construct
  misc_feature 1..18: note = Synthetic
  source 1..18: mol_type = other RNA
cgccgcgacgacctggaa

SEQ ID NO: 18636 - RNA, 19 nt, synthetic construct
  misc_feature 1..19: note = Synthetic
  source 1..19: mol_type = other RNA
ccgccgcgacgacctggaa

SEQ ID NO: 18637 - RNA, 21 nt, synthetic construct
  misc_feature 1..21: note = Synthetic
  source 1..21: mol_type = other RNA
agccgccgcgacgacctggaa

SEQ ID NO: 18638 - RNA, 22 nt, synthetic construct
  misc_feature 1..22: note = Synthetic
  source 1..22: mol_type = other RNA
gagccgccgcgacgacctggaa

SEQ ID NO: 18639 - RNA, 23 nt, synthetic construct
  misc_feature 1..23: note = Synthetic
  source 1..23: mol_type = other RNA
agagccgccgcgacgacctggaa

SEQ ID NO: 18640 - RNA, 24 nt, synthetic construct
  misc_feature 1..24: note = Synthetic
  source 1..24: mol_type = other RNA
gagagccgccgcgacgacctggaa

SEQ ID NO: 18641 - RNA, 18 nt, synthetic construct
  misc_feature 1..18: note = Synthetic
  source 1..18: mol_type = other RNA
cctcgtcggacgaggaca

SEQ ID NO: 18642 - RNA, 19 nt, synthetic construct
  misc_feature 1..19: note = Synthetic
  source 1..19: mol_type = other RNA
tcctcgtcggacgaggaca

SEQ ID NO: 18643 - RNA, 21 nt, synthetic construct
  misc_feature 1..21: note = Synthetic
  source 1..21: mol_type = other RNA
gttcctcgtcggacgaggaca

SEQ ID NO: 18644 - RNA, 22 nt, synthetic construct
  misc_feature 1..22: note = Synthetic
  source 1..22: mol_type = other RNA
tgttcctcgtcggacgaggaca

SEQ ID NO: 18645 - RNA, 23 nt, synthetic construct
  misc_feature 1..23: note = Synthetic
  source 1..23: mol_type = other RNA
gtgttcctcgtcggacgaggaca

SEQ ID NO: 18646 - RNA, 24 nt, synthetic construct
  misc_feature 1..24: note = Synthetic
  source 1..24: mol_type = other RNA
agtgttcctcgtcggacgaggaca

SEQ ID NO: 18647 - RNA, 18 nt, synthetic construct
  misc_feature 1..18: note = Synthetic
  source 1..18: mol_type = other RNA
ggacatggaagaccccca

SEQ ID NO: 18648 - RNA, 19 nt, synthetic construct
  misc_feature 1..19: note = Synthetic
  source 1..19: mol_type = other RNA
aggacatggaagaccccca

SEQ ID NO: 18649 - RNA, 21 nt, synthetic construct
  misc_feature 1..21: note = Synthetic
  source 1..21: mol_type = other RNA
cgaggacatggaagaccccca

SEQ ID NO: 18650 - RNA, 22 nt, synthetic construct
  misc_feature 1..22: note = Synthetic
  source 1..22: mol_type = other RNA
acgaggacatggaagaccccca

SEQ ID NO: 18651 - RNA, 23 nt, synthetic construct
  misc_feature 1..23: note = Synthetic
  source 1..23: mol_type = other RNA
gacgaggacatggaagaccccca

SEQ ID NO: 18652 - RNA, 24 nt, synthetic construct
  misc_feature 1..24: note = Synthetic
  source 1..24: mol_type = other RNA
ggacgaggacatggaagaccccca

SEQ ID NO: 18653 - RNA, 18 nt, synthetic construct
  misc_feature 1..18: note = Synthetic
  source 1..18: mol_type = other RNA
acctggaatcggacagca

SEQ ID NO: 18654 - RNA, 19 nt, synthetic construct
  misc_feature 1..19: note = Synthetic
  source 1..19: mol_type = other RNA
gacctggaatcggacagca

SEQ ID NO: 18655 - RNA, 21 nt, synthetic construct
  misc_feature 1..21: note = Synthetic
  source 1..21: mol_type = other RNA
acgacctggaatcggacagca

SEQ ID NO: 18656 - RNA, 22 nt, synthetic construct
  misc_feature 1..22: note = Synthetic
  source 1..22: mol_type = other RNA
gacgacctggaatcggacagca

SEQ ID NO: 18657 - RNA, 23 nt, synthetic construct
  misc_feature 1..23: note = Synthetic
  source 1..23: mol_type = other RNA
cgacgacctggaatcggacagca

SEQ ID NO: 18658 - RNA, 24 nt, synthetic construct
  misc_feature 1..24: note = Synthetic
  source 1..24: mol_type = other RNA
gcgacgacctggaatcggacagca

SEQ ID NO: 18659 - RNA, 18 nt, synthetic construct
  misc_feature 1..18: note = Synthetic
  source 1..18: mol_type = other RNA
ttgctcccccgagcagca

SEQ ID NO: 18660 - RNA, 19 nt, synthetic construct
  misc_feature 1..19: note = Synthetic
  source 1..19: mol_type = other RNA
cttgctcccccgagcagca

SEQ ID NO: 18661 - RNA, 21 nt, synthetic construct
  misc_feature 1..21: note = Synthetic
  source 1..21: mol_type = other RNA
gtcttgctcccccgagcagca

SEQ ID NO: 18662 - RNA, 22 nt, synthetic construct
  misc_feature 1..22: note = Synthetic
  source 1..22: mol_type = other RNA
cgtcttgctcccccgagcagca

SEQ ID NO: 18663 - RNA, 23 nt, synthetic construct
  misc_feature 1..23: note = Synthetic
  source 1..23: mol_type = other RNA
ccgtcttgctcccccgagcagca

SEQ ID NO: 18664 - RNA, 24 nt, synthetic construct
  misc_feature 1..24: note = Synthetic
  source 1..24: mol_type = other RNA
accgtcttgctcccccgagcagca

SEQ ID NO: 18665 - RNA, 18 nt, synthetic construct
  misc_feature 1..18: note = Synthetic
  source 1..18: mol_type = other RNA
cccagacgcctcgtccga

SEQ ID NO: 18666 - RNA, 19 nt, synthetic construct
  misc_feature 1..19: note = Synthetic
  source 1..19: mol_type = other RNA
acccagacgcctcgtccga

SEQ ID NO: 18667 - RNA, 21 nt, synthetic construct
  misc_feature 1..21: note = Synthetic
  source 1..21: mol_type = other RNA
gcacccagacgcctcgtccga

SEQ ID NO: 18668 - RNA, 22 nt, synthetic construct
  misc_feature 1..22: note = Synthetic
  source 1..22: mol_type = other RNA
agcacccagacgcctcgtccga

SEQ ID NO: 18669 - RNA, 23 nt, synthetic construct
  misc_feature 1..23: note = Synthetic
  source 1..23: mol_type = other RNA
cagcacccagacgcctcgtccga

SEQ ID NO: 18670 - RNA, 24 nt, synthetic construct
  misc_feature 1..24: note = Synthetic
  source 1..24: mol_type = other RNA
ccagcacccagacgcctcgtccga

SEQ ID NO: 18671 - RNA, 18 nt, synthetic construct
  misc_feature 1..18: note = Synthetic
  source 1..18: mol_type = other RNA
atggaagacccccacgga

SEQ ID NO: 18672 - RNA, 19 nt, synthetic construct
  misc_feature 1..19: note = Synthetic
  source 1..19: mol_type = other RNA
catggaagacccccacgga

SEQ ID NO: 18673 - RNA, 21 nt, synthetic construct
  misc_feature 1..21: note = Synthetic
  source 1..21: mol_type = other RNA
gacatggaagacccccacgga

SEQ ID NO: 18674 - RNA, 22 nt, synthetic construct
  misc_feature 1..22: note = Synthetic
  source 1..22: mol_type = other RNA
ggacatggaagacccccacgga

SEQ ID NO: 18675 - RNA, 23 nt, synthetic construct
  misc_feature 1..23: note = Synthetic
  source 1..23: mol_type = other RNA
aggacatggaagacccccacgga

SEQ ID NO: 18676 - RNA, 24 nt, synthetic construct
  misc_feature 1..24: note = Synthetic
  source 1..24: mol_type = other RNA
gaggacatggaagacccccacgga

SEQ ID NO: 18677 - RNA, 18 nt, synthetic construct
  misc_feature 1..18: note = Synthetic
  source 1..18: mol_type = other RNA
ccccacggagaggacgga

SEQ ID NO: 18678 - RNA, 19 nt, synthetic construct
  misc_feature 1..19: note = Synthetic
  source 1..19: mol_type = other RNA
cccccacggagaggacgga

SEQ ID NO: 18679 - RNA, 21 nt, synthetic construct
  misc_feature 1..21: note = Synthetic
  source 1..21: mol_type = other RNA
gacccccacggagaggacgga

SEQ ID NO: 18680 - RNA, 22 nt, synthetic construct
  misc_feature 1..22: note = Synthetic
  source 1..22: mol_type = other RNA
agacccccacggagaggacgga

SEQ ID NO: 18681 - RNA, 23 nt, synthetic construct
  misc_feature 1..23: note = Synthetic
  source 1..23: mol_type = other RNA
aagacccccacggagaggacgga

SEQ ID NO: 18682 - RNA, 24 nt, synthetic construct
  misc_feature 1..24: note = Synthetic
  source 1..24: mol_type = other RNA
gaagacccccacggagaggacgga

SEQ ID NO: 18683 - RNA, 18 nt, synthetic construct
  misc_feature 1..18: note = Synthetic
  source 1..18: mol_type = other RNA
tgctcccccgagcagcac

SEQ ID NO: 18684 - RNA, 19 nt, synthetic construct
  misc_feature 1..19: note = Synthetic
  source 1..19: mol_type = other RNA
ttgctcccccgagcagcac

SEQ ID NO: 18685 - RNA, 21 nt, synthetic construct
  misc_feature 1..21: note = Synthetic
  source 1..21: mol_type = other RNA
tcttgctcccccgagcagcac

SEQ ID NO: 18686 - RNA, 22 nt, synthetic construct
  misc_feature 1..22: note = Synthetic
  source 1..22: mol_type = other RNA
gtcttgctcccccgagcagcac

SEQ ID NO: 18687 - RNA, 23 nt, synthetic construct
  misc_feature 1..23: note = Synthetic
  source 1..23: mol_type = other RNA
cgtcttgctcccccgagcagcac

SEQ ID NO: 18688 - RNA, 24 nt, synthetic construct
  misc_feature 1..24: note = Synthetic
  source 1..24: mol_type = other RNA
ccgtcttgctcccccgagcagcac

SEQ ID NO: 18689 - RNA, 18 nt, synthetic construct
  misc_feature 1..18: note = Synthetic
  source 1..18: mol_type = other RNA
gagagccgccgcgacgac

SEQ ID NO: 18690 - RNA, 19 nt, synthetic construct
  misc_feature 1..19: note = Synthetic
  source 1..19: mol_type = other RNA
ggagagccgccgcgacgac

SEQ ID NO: 18691 - RNA, 21 nt, synthetic construct
  misc_feature 1..21: note = Synthetic
  source 1..21: mol_type = other RNA
gcggagagccgccgcgacgac

SEQ ID NO: 18692 - RNA, 22 nt, synthetic construct
  misc_feature 1..22: note = Synthetic
  source 1..22: mol_type = other RNA
ggcggagagccgccgcgacgac

SEQ ID NO: 18693 - RNA, 23 nt, synthetic construct
  misc_feature 1..23: note = Synthetic
  source 1..23: mol_type = other RNA
cggcggagagccgccgcgacgac

SEQ ID NO: 18694 - RNA, 24 nt, synthetic construct
  misc_feature 1..24: note = Synthetic
  source 1..24: mol_type = other RNA
ccggcggagagccgccgcgacgac

SEQ ID NO: 18695 - RNA, 18 nt, synthetic construct
  misc_feature 1..18: note = Synthetic
  source 1..18: mol_type = other RNA
tcctcgtcggacgaggac

SEQ ID NO: 18696 - RNA, 19 nt, synthetic construct
  misc_feature 1..19: note = Synthetic
  source 1..19: mol_type = other RNA
ttcctcgtcggacgaggac

SEQ ID NO: 18697 - RNA, 21 nt, synthetic construct
  misc_feature 1..21: note = Synthetic
  source 1..21: mol_type = other RNA
tgttcctcgtcggacgaggac

SEQ ID NO: 18698 - RNA, 22 nt, synthetic construct
  misc_feature 1..22: note = Synthetic
  source 1..22: mol_type = other RNA
gtgttcctcgtcggacgaggac

SEQ ID NO: 18699 - RNA, 23 nt, synthetic construct
  misc_feature 1..23: note = Synthetic
  source 1..23: mol_type = other RNA
agtgttcctcgtcggacgaggac

SEQ ID NO: 18700 - RNA, 24 nt, synthetic construct
  misc_feature 1..24: note = Synthetic
  source 1..24: mol_type = other RNA
gagtgttcctcgtcggacgaggac

SEQ ID NO: 18701 - RNA, 18 nt, synthetic construct
  misc_feature 1..18: note = Synthetic
  source 1..18: mol_type = other RNA
cccacggagaggacggac

SEQ ID NO: 18702 - RNA, 19 nt, synthetic construct
  misc_feature 1..19: note = Synthetic
  source 1..19: mol_type = other RNA
ccccacggagaggacggac

SEQ ID NO: 18703 - RNA, 21 nt, synthetic construct
  misc_feature 1..21: note = Synthetic
  source 1..21: mol_type = other RNA
acccccacggagaggacggac

SEQ ID NO: 18704 - RNA, 22 nt, synthetic construct
  misc_feature 1..22: note = Synthetic
  source 1..22: mol_type = other RNA
gacccccacggagaggacggac

SEQ ID NO: 18705 - RNA, 23 nt, synthetic construct
  misc_feature 1..23: note = Synthetic
  source 1..23: mol_type = other RNA
agacccccacggagaggacggac

SEQ ID NO: 18706 - RNA, 24 nt, synthetic construct
  misc_feature 1..24: note = Synthetic
  source 1..24: mol_type = other RNA
aagacccccacggagaggacggac

SEQ ID NO: 18707 - RNA, 18 nt, synthetic construct
  misc_feature 1..18: note = Synthetic
  source 1..18: mol_type = other RNA
gagtgttcctcgtcggac

SEQ ID NO: 18708 - RNA, 19 nt, synthetic construct
  misc_feature 1..19: note = Synthetic
  source 1..19: mol_type = other RNA
ggagtgttcctcgtcggac

SEQ ID NO: 18709 - RNA, 21 nt, synthetic construct
  misc_feature 1..21: note = Synthetic
  source 1..21: mol_type = other RNA
ggggagtgttcctcgtcggac

SEQ ID NO: 18710 - RNA, 22 nt, synthetic construct
  misc_feature 1..22: note = Synthetic
  source 1..22: mol_type = other RNA
cggggagtgttcctcgtcggac

SEQ ID NO: 18711 - RNA, 23 nt, synthetic construct
  misc_feature 1..23: note = Synthetic
  source 1..23: mol_type = other RNA
gcggggagtgttcctcgtcggac

SEQ ID NO: 18712 - RNA, 24 nt, synthetic construct
  misc_feature 1..24: note = Synthetic
  source 1..24: mol_type = other RNA
agcggggagtgttcctcgtcggac

SEQ ID NO: 18713 - RNA, 18 nt, synthetic construct
  misc_feature 1..18: note = Synthetic
  source 1..18: mol_type = other RNA
tccgacagcgatctggac

SEQ ID NO: 18714 - RNA, 19 nt, synthetic construct
  misc_feature 1..19: note = Synthetic
  source 1..19: mol_type = other RNA
ctccgacagcgatctggac

SEQ ID NO: 18715 - RNA, 21 nt, synthetic construct
  misc_feature 1..21: note = Synthetic
  source 1..21: mol_type = other RNA
ctctccgacagcgatctggac

SEQ ID NO: 18716 - RNA, 22 nt, synthetic construct
  misc_feature 1..22: note = Synthetic
  source 1..22: mol_type = other RNA
cctctccgacagcgatctggac

SEQ ID NO: 18717 - RNA, 23 nt, synthetic construct
  misc_feature 1..23: note = Synthetic
  source 1..23: mol_type = other RNA
acctctccgacagcgatctggac

SEQ ID NO: 18718 - RNA, 24 nt, synthetic construct
  misc_feature 1..24: note = Synthetic
  source 1..24: mol_type = other RNA
gacctctccgacagcgatctggac

SEQ ID NO: 18719 - RNA, 18 nt, synthetic construct
  misc_feature 1..18: note = Synthetic
  source 1..18: mol_type = other RNA
ccagaaccaatcgcaacc

SEQ ID NO: 18720 - RNA, 19 nt, synthetic construct
  misc_feature 1..19: note = Synthetic
  source 1..19: mol_type = other RNA
cccagaaccaatcgcaacc

SEQ ID NO: 18721 - RNA, 20 nt, synthetic construct
  misc_feature 1..20: note = Synthetic
  source 1..20: mol_type = other RNA
ccccagaaccaatcgcaacc

SEQ ID NO: 18722 - RNA, 21 nt, synthetic construct
  misc_feature 1..21: note = Synthetic
  source 1..21: mol_type = other RNA
cccccagaaccaatcgcaacc

SEQ ID NO: 18723 - RNA, 22 nt, synthetic construct
  misc_feature 1..22: note = Synthetic
  source 1..22: mol_type = other RNA
gcccccagaaccaatcgcaacc

SEQ ID NO: 18724 - RNA, 23 nt, synthetic construct
  misc_feature 1..23: note = Synthetic
  source 1..23: mol_type = other RNA
tgcccccagaaccaatcgcaacc

SEQ ID NO: 18725 - RNA, 24 nt, synthetic construct
  misc_feature 1..24: note = Synthetic
  source 1..24: mol_type = other RNA
gtgcccccagaaccaatcgcaacc

SEQ ID NO: 18726 - RNA, 18 nt, synthetic construct
  misc_feature 1..18: note = Synthetic
  source 1..18: mol_type = other RNA
cagaaccaatcgcaaccc

SEQ ID NO: 18727 - RNA, 19 nt, synthetic construct
  misc_feature 1..19: note = Synthetic
  source 1..19: mol_type = other RNA
ccagaaccaatcgcaaccc

SEQ ID NO: 18728 - RNA, 21 nt, synthetic construct
  misc_feature 1..21: note = Synthetic
  source 1..21: mol_type = other RNA
ccccagaaccaatcgcaaccc

SEQ ID NO: 18729 - RNA, 22 nt, synthetic construct
  misc_feature 1..22: note = Synthetic
  source 1..22: mol_type = other RNA
cccccagaaccaatcgcaaccc

SEQ ID NO: 18730 - RNA, 23 nt, synthetic construct
  misc_feature 1..23: note = Synthetic
  source 1..23: mol_type = other RNA
gcccccagaaccaatcgcaaccc

SEQ ID NO: 18731 - RNA, 24 nt, synthetic construct
  misc_feature 1..24: note = Synthetic
  source 1..24: mol_type = other RNA
tgcccccagaaccaatcgcaaccc

SEQ ID NO: 18732 - RNA, 18 nt, synthetic construct
  misc_feature 1..18: note = Synthetic
  source 1..18: mol_type = other RNA
aggacatggaagaccccc

SEQ ID NO: 18733 - RNA, 19 nt, synthetic construct
  misc_feature 1..19: note = Synthetic
  source 1..19: mol_type = other RNA
gaggacatggaagaccccc

SEQ ID NO: 18734 - RNA, 21 nt, synthetic construct
  misc_feature 1..21: note = Synthetic
  source 1..21: mol_type = other RNA
acgaggacatggaagaccccc

SEQ ID NO: 18735 - RNA, 22 nt, synthetic construct
  misc_feature 1..22: note = Synthetic
  source 1..22: mol_type = other RNA
gacgaggacatggaagaccccc

SEQ ID NO: 18736 - RNA, 23 nt, synthetic construct
  misc_feature 1..23: note = Synthetic
  source 1..23: mol_type = other RNA
ggacgaggacatggaagaccccc

SEQ ID NO: 18737 - RNA, 24 nt, synthetic construct
  misc_feature 1..24: note = Synthetic
  source 1..24: mol_type = other RNA
cggacgaggacatggaagaccccc

SEQ ID NO: 18738 - RNA, 18 nt, synthetic construct
  misc_feature 1..18: note = Synthetic
  source 1..18: mol_type = other RNA
atctggacgaggaccccc

SEQ ID NO: 18739 - RNA, 19 nt, synthetic construct
  misc_feature 1..19: note = Synthetic
  source 1..19: mol_type = other RNA
gatctggacgaggaccccc

SEQ ID NO: 18740 - RNA, 21 nt, synthetic construct
  misc_feature 1..21: note = Synthetic
  source 1..21: mol_type = other RNA
gcgatctggacgaggaccccc

SEQ ID NO: 18741 - RNA, 22 nt, synthetic construct
  misc_feature 1..22: note = Synthetic
  source 1..22: mol_type = other RNA
agcgatctggacgaggaccccc

SEQ ID NO: 18742 - RNA, 23 nt, synthetic construct
  misc_feature 1..23: note = Synthetic
  source 1..23: mol_type = other RNA
cagcgatctggacgaggaccccc

SEQ ID NO: 18743 - RNA, 24 nt, synthetic construct
  misc_feature 1..24: note = Synthetic
  source 1..24: mol_type = other RNA
acagcgatctggacgaggaccccc

SEQ ID NO: 18744 - RNA, 18 nt, synthetic construct
  misc_feature 1..18: note = Synthetic
  source 1..18: mol_type = other RNA
cccccgccggcgtgcccc

SEQ ID NO: 18745 - RNA, 19 nt, synthetic construct
  misc_feature 1..19: note = Synthetic
  source 1..19: mol_type = other RNA
acccccgccggcgtgcccc

SEQ ID NO: 18746 - RNA, 20 nt, synthetic construct
  misc_feature 1..20: note = Synthetic
  source 1..20: mol_type = other RNA
gacccccgccggcgtgcccc

SEQ ID NO: 18747 - RNA, 21 nt, synthetic construct
  misc_feature 1..21: note = Synthetic
  source 1..21: mol_type = other RNA
ggacccccgccggcgtgcccc

SEQ ID NO: 18748 - RNA, 22 nt, synthetic construct
  misc_feature 1..22: note = Synthetic
  source 1..22: mol_type = other RNA
cggacccccgccggcgtgcccc

SEQ ID NO: 18749 - RNA, 23 nt, synthetic construct
  misc_feature 1..23: note = Synthetic
  source 1..23: mol_type = other RNA
tcggacccccgccggcgtgcccc

SEQ ID NO: 18750 - RNA, 24 nt, synthetic construct
  misc_feature 1..24: note = Synthetic
  source 1..24: mol_type = other RNA
gtcggacccccgccggcgtgcccc

SEQ ID NO: 18751 - RNA, 18 nt, synthetic construct
  misc_feature 1..18: note = Synthetic
  source 1..18: mol_type = other RNA
ggcgaccgtcttgctccc

SEQ ID NO: 18752 - RNA, 19 nt, synthetic construct
  misc_feature 1..19: note = Synthetic
  source 1..19: mol_type = other RNA
cggcgaccgtcttgctccc

SEQ ID NO: 18753 - RNA, 21 nt, synthetic construct
  misc_feature 1..21: note = Synthetic
  source 1..21: mol_type = other RNA
cccggcgaccgtcttgctccc

SEQ ID NO: 18754 - RNA, 22 nt, synthetic construct
  misc_feature 1..22: note = Synthetic
  source 1..22: mol_type = other RNA
gcccggcgaccgtcttgctccc

SEQ ID NO: 18755 - RNA, 23 nt, synthetic construct
  misc_feature 1..23: note = Synthetic
  source 1..23: mol_type = other RNA
ggcccggcgaccgtcttgctccc

SEQ ID NO: 18756 - RNA, 24 nt, synthetic construct
  misc_feature 1..24: note = Synthetic
  source 1..24: mol_type = other RNA
gggcccggcgaccgtcttgctccc

SEQ ID NO: 18757 - RNA, 18 nt, synthetic construct
  misc_feature 1..18: note = Synthetic
  source 1..18: mol_type = other RNA
ctgcccgcggcggacgcc

SEQ ID NO: 18758 - RNA, 19 nt, synthetic construct
  misc_feature 1..19: note = Synthetic
  source 1..19: mol_type = other RNA
cctgcccgcggcggacgcc

SEQ ID NO: 18759 - RNA, 21 nt, synthetic construct
  misc_feature 1..21: note = Synthetic
  source 1..21: mol_type = other RNA
agcctgcccgcggcggacgcc

SEQ ID NO: 18760 - RNA, 22 nt, synthetic construct
  misc_feature 1..22: note = Synthetic
  source 1..22: mol_type = other RNA
cagcctgcccgcggcggacgcc

SEQ ID NO: 18761 - RNA, 23 nt, synthetic construct
  misc_feature 1..23: note = Synthetic
  source 1..23: mol_type = other RNA
ccagcctgcccgcggcggacgcc

SEQ ID NO: 18762 - RNA, 24 nt, synthetic construct
  misc_feature 1..24: note = Synthetic
  source 1..24: mol_type = other RNA
cccagcctgcccgcggcggacgcc

SEQ ID NO: 18763 - RNA, 18 nt, synthetic construct
  misc_feature 1..18: note = Synthetic
  source 1..18: mol_type = other RNA
acagtgtgtggtcgcgcc

SEQ ID NO: 18764 - RNA, 19 nt, synthetic construct
  misc_feature 1..19: note = Synthetic
  source 1..19: mol_type = other RNA
cacagtgtgtggtcgcgcc

SEQ ID NO: 18765 - RNA, 21 nt, synthetic construct
  misc_feature 1..21: note = Synthetic
  source 1..21: mol_type = other RNA
cccacagtgtgtggtcgcgcc

SEQ ID NO: 18766 - RNA, 22 nt, synthetic construct
  misc_feature 1..22: note = Synthetic
  source 1..22: mol_type = other RNA
ccccacagtgtgtggtcgcgcc

SEQ ID NO: 18767 - RNA, 23 nt, synthetic construct
  misc_feature 1..23: note = Synthetic
  source 1..23: mol_type = other RNA
gccccacagtgtgtggtcgcgcc

SEQ ID NO: 18768 - RNA, 24 nt, synthetic construct
  misc_feature 1..24: note = Synthetic
  source 1..24: mol_type = other RNA
cgccccacagtgtgtggtcgcgcc

SEQ ID NO: 18769 - RNA, 18 nt, synthetic construct
  misc_feature 1..18: note = Synthetic
  source 1..18: mol_type = other RNA
tcggggtcgcggtggtcc

SEQ ID NO: 18770 - RNA, 19 nt, synthetic construct
  misc_feature 1..19: note = Synthetic
  source 1..19: mol_type = other RNA
gtcggggtcgcggtggtcc

SEQ ID NO: 18771 - RNA, 21 nt, synthetic construct
  misc_feature 1..21: note = Synthetic
  source 1..21: mol_type = other RNA
gggtcggggtcgcggtggtcc

SEQ ID NO: 18772 - RNA, 22 nt, synthetic construct
  misc_feature 1..22: note = Synthetic
  source 1..22: mol_type = other RNA
ggggtcggggtcgcggtggtcc

SEQ ID NO: 18773 - RNA, 23 nt, synthetic construct
  misc_feature 1..23: note = Synthetic
  source 1..23: mol_type = other RNA
aggggtcggggtcgcggtggtcc

SEQ ID NO: 18774 - RNA, 24 nt, synthetic construct
  misc_feature 1..24: note = Synthetic
  source 1..24: mol_type = other RNA
caggggtcggggtcgcggtggtcc

SEQ ID NO: 18775 - RNA, 18 nt, synthetic construct
  misc_feature 1..18: note = Synthetic
  source 1..18: mol_type = other RNA
ctggaatcggacagcagc

SEQ ID NO: 18776 - RNA, 19 nt, synthetic construct
  misc_feature 1..19: note = Synthetic
  source 1..19: mol_type = other RNA
cctggaatcggacagcagc

SEQ ID NO: 18777 - RNA, 21 nt, synthetic construct
  misc_feature 1..21: note = Synthetic
  source 1..21: mol_type = other RNA
gacctggaatcggacagcagc

SEQ ID NO: 18778 - RNA, 22 nt, synthetic construct
  misc_feature 1..22: note = Synthetic
  source 1..22: mol_type = other RNA
cgacctggaatcggacagcagc

SEQ ID NO: 18779 - RNA, 23 nt, synthetic construct
  misc_feature 1..23: note = Synthetic
  source 1..23: mol_type = other RNA
acgacctggaatcggacagcagc

SEQ ID NO: 18780 - RNA, 24 nt, synthetic construct
  misc_feature 1..24: note = Synthetic
  source 1..24: mol_type = other RNA
gacgacctggaatcggacagcagc

SEQ ID NO: 18781 - RNA, 18 nt, synthetic construct
  misc_feature 1..18: note = Synthetic
  source 1..18: mol_type = other RNA
cttgctcccccgagcagc

SEQ ID NO: 18782 - RNA, 19 nt, synthetic construct
  misc_feature 1..19: note = Synthetic
  source 1..19: mol_type = other RNA
tcttgctcccccgagcagc

SEQ ID NO: 18783 - RNA, 21 nt, synthetic construct
  misc_feature 1..21: note = Synthetic
  source 1..21: mol_type = other RNA
cgtcttgctcccccgagcagc

SEQ ID NO: 18784 - RNA, 22 nt, synthetic construct
  misc_feature 1..22: note = Synthetic
  source 1..22: mol_type = other RNA
ccgtcttgctcccccgagcagc

SEQ ID NO: 18785 - RNA, 23 nt, synthetic construct
  misc_feature 1..23: note = Synthetic
  source 1..23: mol_type = other RNA
accgtcttgctcccccgagcagc

SEQ ID NO: 18786 - RNA, 24 nt, synthetic construct
  misc_feature 1..24: note = Synthetic
  source 1..24: mol_type = other RNA
gaccgtcttgctcccccgagcagc

SEQ ID NO: 18787 - RNA, 18 nt, synthetic construct
  misc_feature 1..18: note = Synthetic
  source 1..18: mol_type = other RNA
atgctaattgacctcggc

SEQ ID NO: 18788 - RNA, 19 nt, synthetic construct
  misc_feature 1..19: note = Synthetic
  source 1..19: mol_type = other RNA
tatgctaattgacctcggc

SEQ ID NO: 18789 - RNA, 21 nt, synthetic construct
  misc_feature 1..21: note = Synthetic
  source 1..21: mol_type = other RNA
gatatgctaattgacctcggc

SEQ ID NO: 18790 - RNA, 22 nt, synthetic construct
  misc_feature 1..22: note = Synthetic
  source 1..22: mol_type = other RNA
tgatatgctaattgacctcggc

SEQ ID NO: 18791 - RNA, 23 nt, synthetic construct
  misc_feature 1..23: note = Synthetic
  source 1..23: mol_type = other RNA
ttgatatgctaattgacctcggc

SEQ ID NO: 18792 - RNA, 24 nt, synthetic construct
  misc_feature 1..24: note = Synthetic
  source 1..24: mol_type = other RNA
attgatatgctaattgacctcggc

SEQ ID NO: 18793 - RNA, 18 nt, synthetic construct
  misc_feature 1..18: note = Synthetic
  source 1..18: mol_type = other RNA
cggtccgcccgtctcgtc

SEQ ID NO: 18794 - RNA, 19 nt, synthetic construct
  misc_feature 1..19: note = Synthetic
  source 1..19: mol_type = other RNA
gcggtccgcccgtctcgtc

SEQ ID NO: 18795 - RNA, 21 nt, synthetic construct
  misc_feature 1..21: note = Synthetic
  source 1..21: mol_type = other RNA
cggcggtccgcccgtctcgtc

SEQ ID NO: 18796 - RNA, 22 nt, synthetic construct
  misc_feature 1..22: note = Synthetic
  source 1..22: mol_type = other RNA
ccggcggtccgcccgtctcgtc

SEQ ID NO: 18797 - RNA, 23 nt, synthetic construct
  misc_feature 1..23: note = Synthetic
  source 1..23: mol_type = other RNA
cccggcggtccgcccgtctcgtc

SEQ ID NO: 18798 - RNA, 24 nt, synthetic construct
  misc_feature 1..24: note = Synthetic
  source 1..24: mol_type = other RNA
gcccggcggtccgcccgtctcgtc

SEQ ID NO: 18799 - RNA, 18 nt, synthetic construct
  misc_feature 1..18: note = Synthetic
  source 1..18: mol_type = other RNA
gtcggggtcgcggtggtc

SEQ ID NO: 18800 - RNA, 19 nt, synthetic construct
  misc_feature 1..19: note = Synthetic
  source 1..19: mol_type = other RNA
ggtcggggtcgcggtggtc

SEQ ID NO: 18801 - RNA, 21 nt, synthetic construct
  misc_feature 1..21: note = Synthetic
  source 1..21: mol_type = other RNA
ggggtcggggtcgcggtggtc

SEQ ID NO: 18802 - RNA, 22 nt, synthetic construct
  misc_feature 1..22: note = Synthetic
  source 1..22: mol_type = other RNA
aggggtcggggtcgcggtggtc

SEQ ID NO: 18803 - RNA, 23 nt, synthetic construct
  misc_feature 1..23: note = Synthetic
  source 1..23: mol_type = other RNA
caggggtcggggtcgcggtggtc

SEQ ID NO: 18804 - RNA, 24 nt, synthetic construct
  misc_feature 1..24: note = Synthetic
  source 1..24: mol_type = other RNA
gcaggggtcggggtcgcggtggtc

SEQ ID NO: 18805 - RNA, 18 nt, synthetic construct
  misc_feature 1..18: note = Synthetic
  source 1..18: mol_type = other RNA
cctggaatcggacagcag

SEQ ID NO: 18806 - RNA, 19 nt, synthetic construct
  misc_feature 1..19: note = Synthetic
  source 1..19: mol_type = other RNA
acctggaatcggacagcag

SEQ ID NO: 18807 - RNA, 21 nt, synthetic construct
  misc_feature 1..21: note = Synthetic
  source 1..21: mol_type = other RNA
cgacctggaatcggacagcag

SEQ ID NO: 18808 - RNA, 22 nt, synthetic construct
  misc_feature 1..22: note = Synthetic
  source 1..22: mol_type = other RNA
acgacctggaatcggacagcag

SEQ ID NO: 18809 - RNA, 23 nt, synthetic construct
  misc_feature 1..23: note = Synthetic
  source 1..23: mol_type = other RNA
gacgacctggaatcggacagcag

SEQ ID NO: 18810 - RNA, 24 nt, synthetic construct
  misc_feature 1..24: note = Synthetic
  source 1..24: mol_type = other RNA
cgacgacctggaatcggacagcag

SEQ ID NO: 18811 - RNA, 18 nt, synthetic construct
  misc_feature 1..18: note = Synthetic
  source 1..18: mol_type = other RNA
acatggaagacccccacg

SEQ ID NO: 18812 - RNA, 19 nt, synthetic construct
  misc_feature 1..19: note = Synthetic
  source 1..19: mol_type = other RNA
gacatggaagacccccacg

SEQ ID NO: 18813 - RNA, 21 nt, synthetic construct
  misc_feature 1..21: note = Synthetic
  source 1..21: mol_type = other RNA
aggacatggaagacccccacg

SEQ ID NO: 18814 - RNA, 22 nt, synthetic construct
  misc_feature 1..22: note = Synthetic
  source 1..22: mol_type = other RNA
gaggacatggaagacccccacg

SEQ ID NO: 18815 - RNA, 23 nt, synthetic construct
  misc_feature 1..23: note = Synthetic
  source 1..23: mol_type = other RNA
cgaggacatggaagacccccacg

SEQ ID NO: 18816 - RNA, 24 nt, synthetic construct
  misc_feature 1..24: note = Synthetic
  source 1..24: mol_type = other RNA
acgaggacatggaagacccccacg

SEQ ID NO: 18817 - RNA, 18 nt, synthetic construct
  misc_feature 1..18: note = Synthetic
  source 1..18: mol_type = other RNA
gaggacccccccgagccg

SEQ ID NO: 18818 - RNA, 19 nt, synthetic construct
  misc_feature 1..19: note = Synthetic
  source 1..19: mol_type = other RNA
cgaggacccccccgagccg

SEQ ID NO: 18819 - RNA, 21 nt, synthetic construct
  misc_feature 1..21: note = Synthetic
  source 1..21: mol_type = other RNA
gacgaggacccccccgagccg

SEQ ID NO: 18820 - RNA, 22 nt, synthetic construct
  misc_feature 1..22: note = Synthetic
  source 1..22: mol_type = other RNA
ggacgaggacccccccgagccg

SEQ ID NO: 18821 - RNA, 23 nt, synthetic construct
  misc_feature 1..23: note = Synthetic
  source 1..23: mol_type = other RNA
tggacgaggacccccccgagccg

SEQ ID NO: 18822 - RNA, 24 nt, synthetic construct
  misc_feature 1..24: note = Synthetic
  source 1..24: mol_type = other RNA
ctggacgaggacccccccgagccg

SEQ ID NO: 18823 - RNA, 18 nt, synthetic construct
  misc_feature 1..18: note = Synthetic
  source 1..18: mol_type = other RNA
acccagacgcctcgtccg

SEQ ID NO: 18824 - RNA, 19 nt, synthetic construct
  misc_feature 1..19: note = Synthetic
  source 1..19: mol_type = other RNA
cacccagacgcctcgtccg

SEQ ID NO: 18825 - RNA, 21 nt, synthetic construct
  misc_feature 1..21: note = Synthetic
  source 1..21: mol_type = other RNA
agcacccagacgcctcgtccg

SEQ ID NO: 18826 - RNA, 22 nt, synthetic construct
  misc_feature 1..22: note = Synthetic
  source 1..22: mol_type = other RNA
cagcacccagacgcctcgtccg

SEQ ID NO: 18827 - RNA, 23 nt, synthetic construct
  misc_feature 1..23: note = Synthetic
  source 1..23: mol_type = other RNA
ccagcacccagacgcctcgtccg

SEQ ID NO: 18828 - RNA, 24 nt, synthetic construct
  misc_feature 1..24: note = Synthetic
  source 1..24: mol_type = other RNA
cccagcacccagacgcctcgtccg

SEQ ID NO: 18829 - RNA, 18 nt, synthetic construct
  misc_feature 1..18: note = Synthetic
  source 1..18: mol_type = other RNA
aagcccagcctgcccgcg

SEQ ID NO: 18830 - RNA, 19 nt, synthetic construct
  misc_feature 1..19: note = Synthetic
  source 1..19: mol_type = other RNA
aaagcccagcctgcccgcg

SEQ ID NO: 18831 - RNA, 21 nt, synthetic construct
  misc_feature 1..21: note = Synthetic
  source 1..21: mol_type = other RNA
ccaaagcccagcctgcccgcg

SEQ ID NO: 18832 - RNA, 22 nt, synthetic construct
  misc_feature 1..22: note = Synthetic
  source 1..22: mol_type = other RNA
accaaagcccagcctgcccgcg

SEQ ID NO: 18833 - RNA, 23 nt, synthetic construct
  misc_feature 1..23: note = Synthetic
  source 1..23: mol_type = other RNA
gaccaaagcccagcctgcccgcg

SEQ ID NO: 18834 - RNA, 24 nt, synthetic construct
  misc_feature 1..24: note = Synthetic
  source 1..24: mol_type = other RNA
cgaccaaagcccagcctgcccgcg

SEQ ID NO: 18835 - RNA, 18 nt, synthetic construct
  misc_feature 1..18: note = Synthetic
  source 1..18: mol_type = other RNA
gacccccccgagccggcg

SEQ ID NO: 18836 - RNA, 19 nt, synthetic construct
  misc_feature 1..19: note = Synthetic
  source 1..19: mol_type = other RNA
ggacccccccgagccggcg

SEQ ID NO: 18837 - RNA, 21 nt, synthetic construct
  misc_feature 1..21: note = Synthetic
  source 1..21: mol_type = other RNA
gaggacccccccgagccggcg

SEQ ID NO: 18838 - RNA, 22 nt, synthetic construct
  misc_feature 1..22: note = Synthetic
  source 1..22: mol_type = other RNA
cgaggacccccccgagccggcg

SEQ ID NO: 18839 - RNA, 23 nt, synthetic construct
  misc_feature 1..23: note = Synthetic
  source 1..23: mol_type = other RNA
acgaggacccccccgagccggcg

SEQ ID NO: 18840 - RNA, 24 nt, synthetic construct
  misc_feature 1..24: note = Synthetic
  source 1..24: mol_type = other RNA
gacgaggacccccccgagccggcg

SEQ ID NO: 18841 - RNA, 18 nt, synthetic construct
  misc_feature 1..18: note = Synthetic
  source 1..18: mol_type = other RNA
agcggggagtgttcctcg

SEQ ID NO: 18842 - RNA, 19 nt, synthetic construct
  misc_feature 1..19: note = Synthetic
  source 1..19: mol_type = other RNA
cagcggggagtgttcctcg

SEQ ID NO: 18843 - RNA, 21 nt, synthetic construct
  misc_feature 1..21: note = Synthetic
  source 1..21: mol_type = other RNA
agcagcggggagtgttcctcg

SEQ ID NO: 18844 - RNA, 22 nt, synthetic construct
  misc_feature 1..22: note = Synthetic
  source 1..22: mol_type = other RNA
cagcagcggggagtgttcctcg

SEQ ID NO: 18845 - RNA, 23 nt, synthetic construct
  misc_feature 1..23: note = Synthetic
  source 1..23: mol_type = other RNA
acagcagcggggagtgttcctcg

SEQ ID NO: 18846 - RNA, 24 nt, synthetic construct
  misc_feature 1..24: note = Synthetic
  source 1..24: mol_type = other RNA
gacagcagcggggagtgttcctcg

SEQ ID NO: 18847 - RNA, 18 nt, synthetic construct
  misc_feature 1..18: note = Synthetic
  source 1..18: mol_type = other RNA
cggacgccgtgggcgtcg

SEQ ID NO: 18848 - RNA, 19 nt, synthetic construct
  misc_feature 1..19: note = Synthetic
  source 1..19: mol_type = other RNA
gcggacgccgtgggcgtcg

SEQ ID NO: 18849 - RNA, 21 nt, synthetic construct
  misc_feature 1..21: note = Synthetic
  source 1..21: mol_type = other RNA
cggcggacgccgtgggcgtcg

SEQ ID NO: 18850 - RNA, 22 nt, synthetic construct
  misc_feature 1..22: note = Synthetic
  source 1..22: mol_type = other RNA
gcggcggacgccgtgggcgtcg

SEQ ID NO: 18851 - RNA, 23 nt, synthetic construct
  misc_feature 1..23: note = Synthetic
  source 1..23: mol_type = other RNA
cgcggcggacgccgtgggcgtcg

SEQ ID NO: 18852 - RNA, 24 nt, synthetic construct
  misc_feature 1..24: note = Synthetic
  source 1..24: mol_type = other RNA
ccgcggcggacgccgtgggcgtcg

SEQ ID NO: 18853 - RNA, 18 nt, synthetic construct
  misc_feature 1..18: note = Synthetic
  source 1..18: mol_type = other RNA
aagacccccacggagagg

SEQ ID NO: 18854 - RNA, 19 nt, synthetic construct
  misc_feature 1..19: note = Synthetic
  source 1..19: mol_type = other RNA
gaagacccccacggagagg

SEQ ID NO: 18855 - RNA, 21 nt, synthetic construct
  misc_feature 1..21: note = Synthetic
  source 1..21: mol_type = other RNA
tggaagacccccacggagagg

SEQ ID NO: 18856 - RNA, 22 nt, synthetic construct
  misc_feature 1..22: note = Synthetic
  source 1..22: mol_type = other RNA
atggaagacccccacggagagg

SEQ ID NO: 18857 - RNA, 23 nt, synthetic construct
  misc_feature 1..23: note = Synthetic
  source 1..23: mol_type = other RNA
catggaagacccccacggagagg

SEQ ID NO: 18858 - RNA, 24 nt, synthetic construct
  misc_feature 1..24: note = Synthetic
  source 1..24: mol_type = other RNA
acatggaagacccccacggagagg

SEQ ID NO: 18859 - RNA, 18 nt, synthetic construct
  misc_feature 1..18: note = Synthetic
  source 1..18: mol_type = other RNA
aggacccccccgagccgg

SEQ ID NO: 18860 - RNA, 19 nt, synthetic construct
  misc_feature 1..19: note = Synthetic
  source 1..19: mol_type = other RNA
gaggacccccccgagccgg

SEQ ID NO: 18861 - RNA, 21 nt, synthetic construct
  misc_feature 1..21: note = Synthetic
  source 1..21: mol_type = other RNA
acgaggacccccccgagccgg

SEQ ID NO: 18862 - RNA, 22 nt, synthetic construct
  misc_feature 1..22: note = Synthetic
  source 1..22: mol_type = other RNA
gacgaggacccccccgagccgg

SEQ ID NO: 18863 - RNA, 23 nt, synthetic construct
  misc_feature 1..23: note = Synthetic
  source 1..23: mol_type = other RNA
ggacgaggacccccccgagccgg

SEQ ID NO: 18864 - RNA, 24 nt, synthetic construct
  misc_feature 1..24: note = Synthetic
  source 1..24: mol_type = other RNA
tggacgaggacccccccgagccgg

SEQ ID NO: 18865 - RNA, 18 nt, synthetic construct
  misc_feature 1..18: note = Synthetic
  source 1..18: mol_type = other RNA
cctcgtccgacggagcgg

SEQ ID NO: 18866 - RNA, 19 nt, synthetic construct
  misc_feature 1..19: note = Synthetic
  source 1..19: mol_type = other RNA
gcctcgtccgacggagcgg

SEQ ID NO: 18867 - RNA, 21 nt, synthetic construct
  misc_feature 1..21: note = Synthetic
  source 1..21: mol_type = other RNA
acgcctcgtccgacggagcgg

SEQ ID NO: 18868 - RNA, 22 nt, synthetic construct
  misc_feature 1..22: note = Synthetic
  source 1..22: mol_type = other RNA
gacgcctcgtccgacggagcgg

SEQ ID NO: 18869 - RNA, 23 nt, synthetic construct
  misc_feature 1..23: note = Synthetic
  source 1..23: mol_type = other RNA
agacgcctcgtccgacggagcgg

SEQ ID NO: 18870 - RNA, 24 nt, synthetic construct
  misc_feature 1..24: note = Synthetic
  source 1..24: mol_type = other RNA
cagacgcctcgtccgacggagcgg

SEQ ID NO: 18871 - RNA, 18 nt, synthetic construct
  misc_feature 1..18: note = Synthetic
  source 1..18: mol_type = other RNA
gggagtgttcctcgtcgg

SEQ ID NO: 18872 - RNA, 19 nt, synthetic construct
  misc_feature 1..19: note = Synthetic
  source 1..19: mol_type = other RNA
ggggagtgttcctcgtcgg

SEQ ID NO: 18873 - RNA, 21 nt, synthetic construct
  misc_feature 1..21: note = Synthetic
  source 1..21: mol_type = other RNA
gcggggagtgttcctcgtcgg

SEQ ID NO: 18874 - RNA, 22 nt, synthetic construct
  misc_feature 1..22: note = Synthetic
  source 1..22: mol_type = other RNA
agcggggagtgttcctcgtcgg

SEQ ID NO: 18875 - RNA, 23 nt, synthetic construct
  misc_feature 1..23: note = Synthetic
  source 1..23: mol_type = other RNA
cagcggggagtgttcctcgtcgg

SEQ ID NO: 18876 - RNA, 24 nt, synthetic construct
  misc_feature 1..24: note = Synthetic
  source 1..24: mol_type = other RNA
gcagcggggagtgttcctcgtcgg

SEQ ID NO: 18877 - RNA, 18 nt, synthetic construct
  misc_feature 1..18: note = Synthetic
  source 1..18: mol_type = other RNA
ccgtgggcgtcgcagggg

SEQ ID NO: 18878 - RNA, 19 nt, synthetic construct
  misc_feature 1..19: note = Synthetic
  source 1..19: mol_type = other RNA
gccgtgggcgtcgcagggg

SEQ ID NO: 18879 - RNA, 21 nt, synthetic construct
  misc_feature 1..21: note = Synthetic
  source 1..21: mol_type = other RNA
acgccgtgggcgtcgcagggg

SEQ ID NO: 18880 - RNA, 22 nt, synthetic construct
  misc_feature 1..22: note = Synthetic
  source 1..22: mol_type = other RNA
gacgccgtgggcgtcgcagggg

SEQ ID NO: 18881 - RNA, 23 nt, synthetic construct
  misc_feature 1..23: note = Synthetic
  source 1..23: mol_type = other RNA
ggacgccgtgggcgtcgcagggg

SEQ ID NO: 18882 - RNA, 24 nt, synthetic construct
  misc_feature 1..24: note = Synthetic
  source 1..24: mol_type = other RNA
cggacgccgtgggcgtcgcagggg

SEQ ID NO: 18883 - RNA, 18 nt, synthetic construct
  misc_feature 1..18: note = Synthetic
  source 1..18: mol_type = other RNA
tctccgacagcgatctgg

SEQ ID NO: 18884 - RNA, 19 nt, synthetic construct
  misc_feature 1..19: note = Synthetic
  source 1..19: mol_type = other RNA
ctctccgacagcgatctgg

SEQ ID NO: 18885 - RNA, 21 nt, synthetic construct
  misc_feature 1..21: note = Synthetic
  source 1..21: mol_type = other RNA
acctctccgacagcgatctgg

SEQ ID NO: 18886 - RNA, 22 nt, synthetic construct
  misc_feature 1..22: note = Synthetic
  source 1..22: mol_type = other RNA
gacctctccgacagcgatctgg

SEQ ID NO: 18887 - RNA, 23 nt, synthetic construct
  misc_feature 1..23: note = Synthetic
  source 1..23: mol_type = other RNA
ggacctctccgacagcgatctgg

SEQ ID NO: 18888 - RNA, 24 nt, synthetic construct
  misc_feature 1..24: note = Synthetic
  source 1..24: mol_type = other RNA
tggacctctccgacagcgatctgg

SEQ ID NO: 18889 - RNA, 18 nt, synthetic construct
  misc_feature 1..18: note = Synthetic
  source 1..18: mol_type = other RNA
gaaccaatcgcaaccctg

SEQ ID NO: 18890 - RNA, 19 nt, synthetic construct
  misc_feature 1..19: note = Synthetic
  source 1..19: mol_type = other RNA
agaaccaatcgcaaccctg

SEQ ID NO: 18891 - RNA, 21 nt, synthetic construct
  misc_feature 1..21: note = Synthetic
  source 1..21: mol_type = other RNA
ccagaaccaatcgcaaccctg

SEQ ID NO: 18892 - RNA, 22 nt, synthetic construct
  misc_feature 1..22: note = Synthetic
  source 1..22: mol_type = other RNA
cccagaaccaatcgcaaccctg

SEQ ID NO: 18893 - RNA, 23 nt, synthetic construct
  misc_feature 1..23: note = Synthetic
  source 1..23: mol_type = other RNA
ccccagaaccaatcgcaaccctg

SEQ ID NO: 18894 - RNA, 24 nt, synthetic construct
  misc_feature 1..24: note = Synthetic
  source 1..24: mol_type = other RNA
cccccagaaccaatcgcaaccctg

SEQ ID NO: 18895 - RNA, 18 nt, synthetic construct
  misc_feature 1..18: note = Synthetic
  source 1..18: mol_type = other RNA
ggggctgccgatggtttg

SEQ ID NO: 18896 - RNA, 19 nt, synthetic construct
  misc_feature 1..19: note = Synthetic
  source 1..19: mol_type = other RNA
cggggctgccgatggtttg

SEQ ID NO: 18897 - RNA, 21 nt, synthetic construct
  misc_feature 1..21: note = Synthetic
  source 1..21: mol_type = other RNA
cccggggctgccgatggtttg

SEQ ID NO: 18898 - RNA, 22 nt, synthetic construct
  misc_feature 1..22: note = Synthetic
  source 1..22: mol_type = other RNA
tcccggggctgccgatggtttg

SEQ ID NO: 18899 - RNA, 23 nt, synthetic construct
  misc_feature 1..23: note = Synthetic
  source 1..23: mol_type = other RNA
gtcccggggctgccgatggtttg

SEQ ID NO: 18900 - RNA, 24 nt, synthetic construct
  misc_feature 1..24: note = Synthetic
  source 1..24: mol_type = other RNA
ggtcccggggctgccgatggtttg

SEQ ID NO: 18901 - RNA, 18 nt, synthetic construct
  misc_feature 1..18: note = Synthetic
  source 1..18: mol_type = other RNA
gacctctccgacagcgat

SEQ ID NO: 18902 - RNA, 19 nt, synthetic construct
  misc_feature 1..19: note = Synthetic
  source 1..19: mol_type = other RNA
ggacctctccgacagcgat

SEQ ID NO: 18903 - RNA, 21 nt, synthetic construct
  misc_feature 1..21: note = Synthetic
  source 1..21: mol_type = other RNA
ctggacctctccgacagcgat

SEQ ID NO: 18904 - RNA, 22 nt, synthetic construct
  misc_feature 1..22: note = Synthetic
  source 1..22: mol_type = other RNA
cctggacctctccgacagcgat

SEQ ID NO: 18905 - RNA, 23 nt, synthetic construct
  misc_feature 1..23: note = Synthetic
  source 1..23: mol_type = other RNA
gcctggacctctccgacagcgat

SEQ ID NO: 18906 - RNA, 24 nt, synthetic construct
  misc_feature 1..24: note = Synthetic
  source 1..24: mol_type = other RNA
ggcctggacctctccgacagcgat

SEQ ID NO: 18907 - RNA, 18 nt, synthetic construct
  misc_feature 1..18: note = Synthetic
  source 1..18: mol_type = other RNA
agaaccaatcgcaaccct

SEQ ID NO: 18908 - RNA, 19 nt, synthetic construct
  misc_feature 1..19: note = Synthetic
  source 1..19: mol_type = other RNA
cagaaccaatcgcaaccct

SEQ ID NO: 18909 - RNA, 21 nt, synthetic construct
  misc_feature 1..21: note = Synthetic
  source 1..21: mol_type = other RNA
cccagaaccaatcgcaaccct

SEQ ID NO: 18910 - RNA, 22 nt, synthetic construct
  misc_feature 1..22: note = Synthetic
  source 1..22: mol_type = other RNA
ccccagaaccaatcgcaaccct

SEQ ID NO: 18911 - RNA, 23 nt, synthetic construct
  misc_feature 1..23: note = Synthetic
  source 1..23: mol_type = other RNA
cccccagaaccaatcgcaaccct

SEQ ID NO: 18912 - RNA, 24 nt, synthetic construct
  misc_feature 1..24: note = Synthetic
  source 1..24: mol_type = other RNA
gcccccagaaccaatcgcaaccct

SEQ ID NO: 18913 - RNA, 18 nt, synthetic construct
  misc_feature 1..18: note = Synthetic
  source 1..18: mol_type = other RNA
cagtgtgtggtcgcgcct

SEQ ID NO: 18914 - RNA, 19 nt, synthetic construct
  misc_feature 1..19: note = Synthetic
  source 1..19: mol_type = other RNA
acagtgtgtggtcgcgcct

SEQ ID NO: 18915 - RNA, 21 nt, synthetic construct
  misc_feature 1..21: note = Synthetic
  source 1..21: mol_type = other RNA
ccacagtgtgtggtcgcgcct

SEQ ID NO: 18916 - RNA, 22 nt, synthetic construct
  misc_feature 1..22: note = Synthetic
  source 1..22: mol_type = other RNA
cccacagtgtgtggtcgcgcct

SEQ ID NO: 18917 - RNA, 23 nt, synthetic construct
  misc_feature 1..23: note = Synthetic
  source 1..23: mol_type = other RNA
ccccacagtgtgtggtcgcgcct

SEQ ID NO: 18918 - RNA, 24 nt, synthetic construct
  misc_feature 1..24: note = Synthetic
  source 1..24: mol_type = other RNA
gccccacagtgtgtggtcgcgcct

SEQ ID NO: 18919 - RNA, 18 nt, synthetic construct
  misc_feature 1..18: note = Synthetic
  source 1..18: mol_type = other RNA
gaaacggctgccccccaa

SEQ ID NO: 18920 - RNA, 19 nt, synthetic construct
  misc_feature 1..19: note = Synthetic
  source 1..19: mol_type = other RNA
ggaaacggctgccccccaa

SEQ ID NO: 18921 - RNA, 22 nt, synthetic construct
  misc_feature 1..22: note = Synthetic
  source 1..22: mol_type = other RNA
gcgggaaacggctgccccccaa

SEQ ID NO: 18922 - RNA, 23 nt, synthetic construct
  misc_feature 1..23: note = Synthetic
  source 1..23: mol_type = other RNA
ggcgggaaacggctgccccccaa

SEQ ID NO: 18923 - RNA, 19 nt, synthetic construct
  misc_feature 1..19: note = Synthetic
  source 1..19: mol_type = other RNA
gccgcggtcgtcccgataa

SEQ ID NO: 18924 - RNA, 24 nt, synthetic construct
  misc_feature 1..24: note = Synthetic
  source 1..24: mol_type = other RNA
gcacagccgcggtcgtcccgataa

SEQ ID NO: 18925 - RNA, 21 nt, synthetic construct
  misc_feature 1..21: note = Synthetic
  source 1..21: mol_type = other RNA
gtttttattgtacctaaaaca

SEQ ID NO: 18926 - RNA, 19 nt, synthetic construct
  misc_feature 1..19: note = Synthetic
  source 1..19: mol_type = other RNA
gccccggggcggggtcccc

SEQ ID NO: 18927 - RNA, 22 nt, synthetic construct
  misc_feature 1..22: note = Synthetic
  source 1..22: mol_type = other RNA
gccttggcggtcgatgcggccc

SEQ ID NO: 18928 - RNA, 23 nt, synthetic construct
  misc_feature 1..23: note = Synthetic
  source 1..23: mol_type = other RNA
ggccttggcggtcgatgcggccc

SEQ ID NO: 18929 - RNA, 18 nt, synthetic construct
  misc_feature 1..18: note = Synthetic
  source 1..18: mol_type = other RNA
gctccggggccggggcgc

SEQ ID NO: 18930 - RNA, 18 nt, synthetic construct
  misc_feature 1..18: note = Synthetic
  source 1..18: mol_type = other RNA
gcggttggcgagcctggc

SEQ ID NO: 18931 - RNA, 21 nt, synthetic construct
  misc_feature 1..21: note = Synthetic
  source 1..21: mol_type = other RNA
gacgcggttggcgagcctggc

SEQ ID NO: 18932 - RNA, 23 nt, synthetic construct
  misc_feature 1..23: note = Synthetic
  source 1..23: mol_type = other RNA
gaacactcctggcggtgcgtgtc

SEQ ID NO: 18933 - RNA, 18 nt, synthetic construct
  misc_feature 1..18: note = Synthetic
  source 1..18: mol_type = other RNA
gccagaatgacaaacacg

SEQ ID NO: 18934 - RNA, 19 nt, synthetic construct
  misc_feature 1..19: note = Synthetic
  source 1..19: mol_type = other RNA
ggccagaatgacaaacacg

SEQ ID NO: 18935 - RNA, 23 nt, synthetic construct
  misc_feature 1..23: note = Synthetic
  source 1..23: mol_type = other RNA
gcctggccagaatgacaaacacg

SEQ ID NO: 18936 - RNA, 18 nt, synthetic construct
  misc_feature 1..18: note = Synthetic
  source 1..18: mol_type = other RNA
gtgtccgctggcctccgg

SEQ ID NO: 18937 - RNA, 23 nt, synthetic construct
  misc_feature 1..23: note = Synthetic
  source 1..23: mol_type = other RNA
gccccgtgtccgctggcctccgg

SEQ ID NO: 18938 - RNA, 18 nt, synthetic construct
  misc_feature 1..18: note = Synthetic
  source 1..18: mol_type = other RNA
gccagcgtcattagcggg

SEQ ID NO: 18939 - RNA, 24 nt, synthetic construct
  misc_feature 1..24: note = Synthetic
  source 1..24: mol_type = other RNA
gcaatcgccagcgtcattagcggg

SEQ ID NO: 18940 - RNA, 18 nt, synthetic construct
  misc_feature 1..18: note = Synthetic
  source 1..18: mol_type = other RNA
gtccaccccgccccgggg

SEQ ID NO: 18941 - RNA, 22 nt, synthetic construct
  misc_feature 1..22: note = Synthetic
  source 1..22: mol_type = other RNA
gtccgtccaccccgccccgggg

SEQ ID NO: 18942 - RNA, 18 nt, synthetic construct
  misc_feature 1..18: note = Synthetic
  source 1..18: mol_type = other RNA
gcgcagcggcaggttgtg

SEQ ID NO: 18943 - RNA, 19 nt, synthetic construct
  misc_feature 1..19: note = Synthetic
  source 1..19: mol_type = other RNA
ggcgcagcggcaggttgtg

SEQ ID NO: 18944 - RNA, 20 nt, synthetic construct
  misc_feature 1..20: note = Synthetic
  source 1..20: mol_type = other RNA
gggcgcagcggcaggttgtg

SEQ ID NO: 18945 - RNA, 21 nt, synthetic construct
  misc_feature 1..21: note = Synthetic
  source 1..21: mol_type = other RNA
ggggcgcagcggcaggttgtg

SEQ ID NO: 18946 - RNA, 22 nt, synthetic construct
  misc_feature 1..22: note = Synthetic
  source 1..22: mol_type = other RNA
gggggcgcagcggcaggttgtg

SEQ ID NO: 18947 - RNA, 19 nt, synthetic construct
  misc_feature 1..19: note = Synthetic
  source 1..19: mol_type = other RNA
gccccgtgtccgctggcct

SEQ ID NO: 18948 - RNA, 23 nt, synthetic construct
  misc_feature 1..23: note = Synthetic
  source 1..23: mol_type = other RNA
gcacgccccgtgtccgctggcct

SEQ ID NO: 18949 - RNA, 22 nt, synthetic construct
  misc_feature 1..22: note = Synthetic
  source 1..22: mol_type = other RNA
gaaatcctagacacgcaccgcc

SEQ ID NO: 18950 - RNA, 18 nt, synthetic construct
  misc_feature 1..18: note = Synthetic
  source 1..18: mol_type = other RNA
gggcagccgtttcccgcc

SEQ ID NO: 18951 - RNA, 19 nt, synthetic construct
  misc_feature 1..19: note = Synthetic
  source 1..19: mol_type = other RNA
ggggcagccgtttcccgcc

SEQ ID NO: 18952 - RNA, 21 nt, synthetic construct
  misc_feature 1..21: note = Synthetic
  source 1..21: mol_type = other RNA
ggggggcagccgtttcccgcc

SEQ ID NO: 18953 - RNA, 21 nt, synthetic construct
  misc_feature 1..21: note = Synthetic
  source 1..21: mol_type = other RNA
gccctttgacgccgagaccag

SEQ ID NO: 18954 - RNA, 22 nt, synthetic construct
  misc_feature 1..22: note = Synthetic
  source 1..22: mol_type = other RNA
ggccctttgacgccgagaccag

SEQ ID NO: 18955 - RNA, 23 nt, synthetic construct
  misc_feature 1..23: note = Synthetic
  source 1..23: mol_type = other RNA
gggccctttgacgccgagaccag

SEQ ID NO: 18956 - RNA, 18 nt, synthetic construct
  misc_feature 1..18: note = Synthetic
  source 1..18: mol_type = other RNA
ggggaccccgccccgggg

SEQ ID NO: 18957 - RNA, 19 nt, synthetic construct
  misc_feature 1..19: note = Synthetic
  source 1..19: mol_type = other RNA
gggggaccccgccccgggg

SEQ ID NO: 18958 - RNA, 18 nt, synthetic construct
  misc_feature 1..18: note = Synthetic
  source 1..18: mol_type = other RNA
gggacgaccgcggctgtg

SEQ ID NO: 18959 - RNA, 19 nt, synthetic construct
  misc_feature 1..19: note = Synthetic
  source 1..19: mol_type = other RNA
gagtgttcgagtcgtgtct

SEQ ID NO: 18960 - RNA, 24 nt, synthetic construct
  misc_feature 1..24: note = Synthetic
  source 1..24: mol_type = other RNA
gccaggagtgttcgagtcgtgtct

SEQ ID NO: 18961 - RNA, 21 nt, synthetic construct
  misc_feature 1..21: note = Synthetic
  source 1..21: mol_type = other RNA
gacacgcaccgccaggagtgt

SEQ ID NO: 18962 - RNA, 24 nt, synthetic construct
  misc_feature 1..24: note = Synthetic
  source 1..24: mol_type = other RNA
gatcgactacgcgacccttggtgt

SEQ ID NO: 18963 - RNA, 21 nt, synthetic construct
  misc_feature 1..21: note = Synthetic
  source 1..21: mol_type = other RNA
cgggaaacggctgccccccaa

SEQ ID NO: 18964 - RNA, 24 nt, synthetic construct
  misc_feature 1..24: note = Synthetic
  source 1..24: mol_type = other RNA
cggcgggaaacggctgccccccaa

SEQ ID NO: 18965 - RNA, 18 nt, synthetic construct
  misc_feature 1..18: note = Synthetic
  source 1..18: mol_type = other RNA
ccgcggtcgtcccgataa

SEQ ID NO: 18966 - RNA, 21 nt, synthetic construct
  misc_feature 1..21: note = Synthetic
  source 1..21: mol_type = other RNA
cagccgcggtcgtcccgataa

SEQ ID NO: 18967 - RNA, 22 nt, synthetic construct
  misc_feature 1..22: note = Synthetic
  source 1..22: mol_type = other RNA
acagccgcggtcgtcccgataa

SEQ ID NO: 18968 - RNA, 23 nt, synthetic construct
  misc_feature 1..23: note = Synthetic
  source 1..23: mol_type = other RNA
cacagccgcggtcgtcccgataa

SEQ ID NO: 18969 - RNA, 18 nt, synthetic construct
  misc_feature 1..18: note = Synthetic
  source 1..18: mol_type = other RNA
tttattgtacctaaaaca

SEQ ID NO: 18970 - RNA, 19 nt, synthetic construct
  misc_feature 1..19: note = Synthetic
  source 1..19: mol_type = other RNA
ttttattgtacctaaaaca

SEQ ID NO: 18971 - RNA, 22 nt, synthetic construct
  misc_feature 1..22: note = Synthetic
  source 1..22: mol_type = other RNA
tgtttttattgtacctaaaaca

SEQ ID NO: 18972 - RNA, 23 nt, synthetic construct
  misc_feature 1..23: note = Synthetic
  source 1..23: mol_type = other RNA
ttgtttttattgtacctaaaaca

SEQ ID NO: 18973 - RNA, 24 nt, synthetic construct
  misc_feature 1..24: note = Synthetic
  source 1..24: mol_type = other RNA
tttgtttttattgtacctaaaaca

SEQ ID NO: 18974 - RNA, 18 nt, synthetic construct
  misc_feature 1..18: note = Synthetic
  source 1..18: mol_type = other RNA
ctctccgaccccgacacc

SEQ ID NO: 18975 - RNA, 19 nt, synthetic construct
  misc_feature 1..19: note = Synthetic
  source 1..19: mol_type = other RNA
tctctccgaccccgacacc

SEQ ID NO: 18976 - RNA, 20 nt, synthetic construct
  misc_feature 1..20: note = Synthetic
  source 1..20: mol_type = other RNA
ttctctccgaccccgacacc

SEQ ID NO: 18977 - RNA, 21 nt, synthetic construct
  misc_feature 1..21: note = Synthetic
  source 1..21: mol_type = other RNA
cttctctccgaccccgacacc

SEQ ID NO: 18978 - RNA, 22 nt, synthetic construct
  misc_feature 1..22: note = Synthetic
  source 1..22: mol_type = other RNA
tcttctctccgaccccgacacc

SEQ ID NO: 18979 - RNA, 23 nt, synthetic construct
  misc_feature 1..23: note = Synthetic
  source 1..23: mol_type = other RNA
atcttctctccgaccccgacacc

SEQ ID NO: 18980 - RNA, 24 nt, synthetic construct
  misc_feature 1..24: note = Synthetic
  source 1..24: mol_type = other RNA
catcttctctccgaccccgacacc

SEQ ID NO: 18981 - RNA, 18 nt, synthetic construct
  misc_feature 1..18: note = Synthetic
  source 1..18: mol_type = other RNA
ccccggggcggggtcccc

SEQ ID NO: 18982 - RNA, 20 nt, synthetic construct
  misc_feature 1..20: note = Synthetic
  source 1..20: mol_type = other RNA
cgccccggggcggggtcccc

SEQ ID NO: 18983 - RNA, 21 nt, synthetic construct
  misc_feature 1..21: note = Synthetic
  source 1..21: mol_type = other RNA
ccgccccggggcggggtcccc

SEQ ID NO: 18984 - RNA, 22 nt, synthetic construct
  misc_feature 1..22: note = Synthetic
  source 1..22: mol_type = other RNA
cccgccccggggcggggtcccc

SEQ ID NO: 18985 - RNA, 23 nt, synthetic construct
  misc_feature 1..23: note = Synthetic
  source 1..23: mol_type = other RNA
ccccgccccggggcggggtcccc

SEQ ID NO: 18986 - RNA, 24 nt, synthetic construct
  misc_feature 1..24: note = Synthetic
  source 1..24: mol_type = other RNA
accccgccccggggcggggtcccc

SEQ ID NO: 18987 - RNA, 18 nt, synthetic construct
  misc_feature 1..18: note = Synthetic
  source 1..18: mol_type = other RNA
tggcggtcgatgcggccc

SEQ ID NO: 18988 - RNA, 19 nt, synthetic construct
  misc_feature 1..19: note = Synthetic
  source 1..19: mol_type = other RNA
ttggcggtcgatgcggccc

SEQ ID NO: 18989 - RNA, 20 nt, synthetic construct
  misc_feature 1..20: note = Synthetic
  source 1..20: mol_type = other RNA
cttggcggtcgatgcggccc

SEQ ID NO: 18990 - RNA, 21 nt, synthetic construct
  misc_feature 1..21: note = Synthetic
  source 1..21: mol_type = other RNA
ccttggcggtcgatgcggccc

SEQ ID NO: 18991 - RNA, 24 nt, synthetic construct
  misc_feature 1..24: note = Synthetic
  source 1..24: mol_type = other RNA
tggccttggcggtcgatgcggccc

SEQ ID NO: 18992 - RNA, 19 nt, synthetic construct
  misc_feature 1..19: note = Synthetic
  source 1..19: mol_type = other RNA
cgctccggggccggggcgc

SEQ ID NO: 18993 - RNA, 21 nt, synthetic construct
  misc_feature 1..21: note = Synthetic
  source 1..21: mol_type = other RNA
ttcgctccggggccggggcgc

SEQ ID NO: 18994 - RNA, 22 nt, synthetic construct
  misc_feature 1..22: note = Synthetic
  source 1..22: mol_type = other RNA
tttcgctccggggccggggcgc

SEQ ID NO: 18995 - RNA, 23 nt, synthetic construct
  misc_feature 1..23: note = Synthetic
  source 1..23: mol_type = other RNA
ctttcgctccggggccggggcgc

SEQ ID NO: 18996 - RNA, 24 nt, synthetic construct
  misc_feature 1..24: note = Synthetic
  source 1..24: mol_type = other RNA
cctttcgctccggggccggggcgc

SEQ ID NO: 18997 - RNA, 19 nt, synthetic construct
  misc_feature 1..19: note = Synthetic
  source 1..19: mol_type = other RNA
cgcggttggcgagcctggc

SEQ ID NO: 18998 - RNA, 20 nt, synthetic construct
  misc_feature 1..20: note = Synthetic
  source 1..20: mol_type = other RNA
acgcggttggcgagcctggc

SEQ ID NO: 18999 - RNA, 22 nt, synthetic construct
  misc_feature 1..22: note = Synthetic
  source 1..22: mol_type = other RNA
cgacgcggttggcgagcctggc

SEQ ID NO: 19000 - RNA, 23 nt, synthetic construct
  misc_feature 1..23: note = Synthetic
  source 1..23: mol_type = other RNA
tcgacgcggttggcgagcctggc

SEQ ID NO: 19001 - RNA, 24 nt, synthetic construct
  misc_feature 1..24: note = Synthetic
  source 1..24: mol_type = other RNA
ctcgacgcggttggcgagcctggc

SEQ ID NO: 19002 - RNA, 18 nt, synthetic construct
  misc_feature 1..18: note = Synthetic
  source 1..18: mol_type = other RNA
ctcctggcggtgcgtgtc

SEQ ID NO: 19003 - RNA, 19 nt, synthetic construct
  misc_feature 1..19: note = Synthetic
  source 1..19: mol_type = other RNA
actcctggcggtgcgtgtc

SEQ ID NO: 19004 - RNA, 20 nt, synthetic construct
  misc_feature 1..20: note = Synthetic
  source 1..20: mol_type = other RNA
cactcctggcggtgcgtgtc

SEQ ID NO: 19005 - RNA, 21 nt, synthetic construct
  misc_feature 1..21: note = Synthetic
  source 1..21: mol_type = other RNA
acactcctggcggtgcgtgtc

SEQ ID NO: 19006 - RNA, 22 nt, synthetic construct
  misc_feature 1..22: note = Synthetic
  source 1..22: mol_type = other RNA
aacactcctggcggtgcgtgtc

SEQ ID NO: 19007 - RNA, 24 nt, synthetic construct
  misc_feature 1..24: note = Synthetic
  source 1..24: mol_type = other RNA
cgaacactcctggcggtgcgtgtc

SEQ ID NO: 19008 - RNA, 20 nt, synthetic construct
  misc_feature 1..20: note = Synthetic
  source 1..20: mol_type = other RNA
tggccagaatgacaaacacg

SEQ ID NO: 19009 - RNA, 21 nt, synthetic construct
  misc_feature 1..21: note = Synthetic
  source 1..21: mol_type = other RNA
ctggccagaatgacaaacacg

SEQ ID NO: 19010 - RNA, 22 nt, synthetic construct
  misc_feature 1..22: note = Synthetic
  source 1..22: mol_type = other RNA
cctggccagaatgacaaacacg

SEQ ID NO: 19011 - RNA, 24 nt, synthetic construct
  misc_feature 1..24: note = Synthetic
  source 1..24: mol_type = other RNA
agcctggccagaatgacaaacacg

SEQ ID NO: 19012 - RNA, 19 nt, synthetic construct
  misc_feature 1..19: note = Synthetic
  source 1..19: mol_type = other RNA
cgtgtccgctggcctccgg

SEQ ID NO: 19013 - RNA, 20 nt, synthetic construct
  misc_feature 1..20: note = Synthetic
  source 1..20: mol_type = other RNA
ccgtgtccgctggcctccgg

SEQ ID NO: 19014 - RNA, 21 nt, synthetic construct
  misc_feature 1..21: note = Synthetic
  source 1..21: mol_type = other RNA
cccgtgtccgctggcctccgg

SEQ ID NO: 19015 - RNA, 22 nt, synthetic construct
  misc_feature 1..22: note = Synthetic
  source 1..22: mol_type = other RNA
ccccgtgtccgctggcctccgg

SEQ ID NO: 19016 - RNA, 24 nt, synthetic construct
  misc_feature 1..24: note = Synthetic
  source 1..24: mol_type = other RNA
cgccccgtgtccgctggcctccgg

SEQ ID NO: 19017 - RNA, 19 nt, synthetic construct
  misc_feature 1..19: note = Synthetic
  source 1..19: mol_type = other RNA
cgccagcgtcattagcggg

SEQ ID NO: 19018 - RNA, 21 nt, synthetic construct
  misc_feature 1..21: note = Synthetic
  source 1..21: mol_type = other RNA
atcgccagcgtcattagcggg

SEQ ID NO: 19019 - RNA, 22 nt, synthetic construct
  misc_feature 1..22: note = Synthetic
  source 1..22: mol_type = other RNA
aatcgccagcgtcattagcggg

SEQ ID NO: 19020 - RNA, 23 nt, synthetic construct
  misc_feature 1..23: note = Synthetic
  source 1..23: mol_type = other RNA
caatcgccagcgtcattagcggg

SEQ ID NO: 19021 - RNA, 19 nt, synthetic construct
  misc_feature 1..19: note = Synthetic
  source 1..19: mol_type = other RNA
cgtccaccccgccccgggg

SEQ ID NO: 19022 - RNA, 21 nt, synthetic construct
  misc_feature 1..21: note = Synthetic
  source 1..21: mol_type = other RNA
tccgtccaccccgccccgggg

SEQ ID NO: 19023 - RNA, 23 nt, synthetic construct
  misc_feature 1..23: note = Synthetic
  source 1..23: mol_type = other RNA
cgtccgtccaccccgccccgggg

SEQ ID NO: 19024 - RNA, 24 nt, synthetic construct
  misc_feature 1..24: note = Synthetic
  source 1..24: mol_type = other RNA
ccgtccgtccaccccgccccgggg

SEQ ID NO: 19025 - RNA, 23 nt, synthetic construct
  misc_feature 1..23: note = Synthetic
  source 1..23: mol_type = other RNA
tgggggcgcagcggcaggttgtg

SEQ ID NO: 19026 - RNA, 24 nt, synthetic construct
  misc_feature 1..24: note = Synthetic
  source 1..24: mol_type = other RNA
ctgggggcgcagcggcaggttgtg

SEQ ID NO: 19027 - RNA, 18 nt, synthetic construct
  misc_feature 1..18: note = Synthetic
  source 1..18: mol_type = other RNA
ccccgtgtccgctggcct

SEQ ID NO: 19028 - RNA, 20 nt, synthetic construct
  misc_feature 1..20: note = Synthetic
  source 1..20: mol_type = other RNA
cgccccgtgtccgctggcct

SEQ ID NO: 19029 - RNA, 21 nt, synthetic construct
  misc_feature 1..21: note = Synthetic
  source 1..21: mol_type = other RNA
acgccccgtgtccgctggcct

SEQ ID NO: 19030 - RNA, 22 nt, synthetic construct
  misc_feature 1..22: note = Synthetic
  source 1..22: mol_type = other RNA
cacgccccgtgtccgctggcct

SEQ ID NO: 19031 - RNA, 24 nt, synthetic construct
  misc_feature 1..24: note = Synthetic
  source 1..24: mol_type = other RNA
cgcacgccccgtgtccgctggcct

SEQ ID NO: 19032 - RNA, 18 nt, synthetic construct
  misc_feature 1..18: note = Synthetic
  source 1..18: mol_type = other RNA
tcctagacacgcaccgcc

SEQ ID NO: 19033 - RNA, 19 nt, synthetic construct
  misc_feature 1..19: note = Synthetic
  source 1..19: mol_type = other RNA
atcctagacacgcaccgcc

SEQ ID NO: 19034 - RNA, 21 nt, synthetic construct
  misc_feature 1..21: note = Synthetic
  source 1..21: mol_type = other RNA
aaatcctagacacgcaccgcc

SEQ ID NO: 19035 - RNA, 23 nt, synthetic construct
  misc_feature 1..23: note = Synthetic
  source 1..23: mol_type = other RNA
cgaaatcctagacacgcaccgcc

SEQ ID NO: 19036 - RNA, 24 nt, synthetic construct
  misc_feature 1..24: note = Synthetic
  source 1..24: mol_type = other RNA
tcgaaatcctagacacgcaccgcc

SEQ ID NO: 19037 - RNA, 22 nt, synthetic construct
  misc_feature 1..22: note = Synthetic
  source 1..22: mol_type = other RNA
tggggggcagccgtttcccgcc

SEQ ID NO: 19038 - RNA, 23 nt, synthetic construct
  misc_feature 1..23: note = Synthetic
  source 1..23: mol_type = other RNA
ttggggggcagccgtttcccgcc

SEQ ID NO: 19039 - RNA, 24 nt, synthetic construct
  misc_feature 1..24: note = Synthetic
  source 1..24: mol_type = other RNA
tttggggggcagccgtttcccgcc

SEQ ID NO: 19040 - RNA, 18 nt, synthetic construct
  misc_feature 1..18: note = Synthetic
  source 1..18: mol_type = other RNA
ctttgacgccgagaccag

SEQ ID NO: 19041 - RNA, 19 nt, synthetic construct
  misc_feature 1..19: note = Synthetic
  source 1..19: mol_type = other RNA
cctttgacgccgagaccag

SEQ ID NO: 19042 - RNA, 24 nt, synthetic construct
  misc_feature 1..24: note = Synthetic
  source 1..24: mol_type = other RNA
agggccctttgacgccgagaccag

SEQ ID NO: 19043 - RNA, 21 nt, synthetic construct
  misc_feature 1..21: note = Synthetic
  source 1..21: mol_type = other RNA
ctgggggaccccgccccgggg

SEQ ID NO: 19044 - RNA, 22 nt, synthetic construct
  misc_feature 1..22: note = Synthetic
  source 1..22: mol_type = other RNA
cctgggggaccccgccccgggg

SEQ ID NO: 19045 - RNA, 23 nt, synthetic construct
  misc_feature 1..23: note = Synthetic
  source 1..23: mol_type = other RNA
ccctgggggaccccgccccgggg

SEQ ID NO: 19046 - RNA, 24 nt, synthetic construct
  misc_feature 1..24: note = Synthetic
  source 1..24: mol_type = other RNA
accctgggggaccccgccccgggg

SEQ ID NO: 19047 - RNA, 19 nt, synthetic construct
  misc_feature 1..19: note = Synthetic
  source 1..19: mol_type = other RNA
cgggacgaccgcggctgtg

SEQ ID NO: 19048 - RNA, 21 nt, synthetic construct
  misc_feature 1..21: note = Synthetic
  source 1..21: mol_type = other RNA
atcgggacgaccgcggctgtg

SEQ ID NO: 19049 - RNA, 22 nt, synthetic construct
  misc_feature 1..22: note = Synthetic
  source 1..22: mol_type = other RNA
tatcgggacgaccgcggctgtg

SEQ ID NO: 19050 - RNA, 23 nt, synthetic construct
  misc_feature 1..23: note = Synthetic
  source 1..23: mol_type = other RNA
ttatcgggacgaccgcggctgtg

SEQ ID NO: 19051 - RNA, 24 nt, synthetic construct
  misc_feature 1..24: note = Synthetic
  source 1..24: mol_type = other RNA
attatcgggacgaccgcggctgtg

SEQ ID NO: 19052 - RNA, 18 nt, synthetic construct
  misc_feature 1..18: note = Synthetic
  source 1..18: mol_type = other RNA
agtgttcgagtcgtgtct

SEQ ID NO: 19053 - RNA, 21 nt, synthetic construct
  misc_feature 1..21: note = Synthetic
  source 1..21: mol_type = other RNA
aggagtgttcgagtcgtgtct

SEQ ID NO: 19054 - RNA, 22 nt, synthetic construct
  misc_feature 1..22: note = Synthetic
  source 1..22: mol_type = other RNA
caggagtgttcgagtcgtgtct

SEQ ID NO: 19055 - RNA, 23 nt, synthetic construct
  misc_feature 1..23: note = Synthetic
  source 1..23: mol_type = other RNA
ccaggagtgttcgagtcgtgtct

SEQ ID NO: 19056 - RNA, 18 nt, synthetic construct
  misc_feature 1..18: note = Synthetic
  source 1..18: mol_type = other RNA
acgcaccgccaggagtgt

SEQ ID NO: 19057 - RNA, 19 nt, synthetic construct
  misc_feature 1..19: note = Synthetic
  source 1..19: mol_type = other RNA
cacgcaccgccaggagtgt

SEQ ID NO: 19058 - RNA, 22 nt, synthetic construct
  misc_feature 1..22: note = Synthetic
  source 1..22: mol_type = other RNA
agacacgcaccgccaggagtgt

SEQ ID NO: 19059 - RNA, 23 nt, synthetic construct
  misc_feature 1..23: note = Synthetic
  source 1..23: mol_type = other RNA
tagacacgcaccgccaggagtgt

SEQ ID NO: 19060 - RNA, 24 nt, synthetic construct
  misc_feature 1..24: note = Synthetic
  source 1..24: mol_type = other RNA
ctagacacgcaccgccaggagtgt

SEQ ID NO: 19061 - RNA, 18 nt, synthetic construct
  misc_feature 1..18: note = Synthetic
  source 1..18: mol_type = other RNA
ctacgcgacccttggtgt

SEQ ID NO: 19062 - RNA, 19 nt, synthetic construct
  misc_feature 1..19: note = Synthetic
  source 1..19: mol_type = other RNA
actacgcgacccttggtgt

SEQ ID NO: 19063 - RNA, 21 nt, synthetic construct
  misc_feature 1..21: note = Synthetic
  source 1..21: mol_type = other RNA
cgactacgcgacccttggtgt

SEQ ID NO: 19064 - RNA, 22 nt, synthetic construct
  misc_feature 1..22: note = Synthetic
  source 1..22: mol_type = other RNA
tcgactacgcgacccttggtgt

SEQ ID NO: 19065 - RNA, 23 nt, synthetic construct
  misc_feature 1..23: note = Synthetic
  source 1..23: mol_type = other RNA
atcgactacgcgacccttggtgt

SEQ ID NO: 19066 - RNA, 18 nt, synthetic construct
  misc_feature 1..18: note = Synthetic
  source 1..18: mol_type = other RNA
tttttattgtacctaaaa

SEQ ID NO: 19067 - RNA, 19 nt, synthetic construct
  misc_feature 1..19: note = Synthetic
  source 1..19: mol_type = other RNA
gtttttattgtacctaaaa

SEQ ID NO: 19068 - RNA, 20 nt, synthetic construct
  misc_feature 1..20: note = Synthetic
  source 1..20: mol_type = other RNA
tgtttttattgtacctaaaa

SEQ ID NO: 19069 - RNA, 21 nt, synthetic construct
  misc_feature 1..21: note = Synthetic
  source 1..21: mol_type = other RNA
ttgtttttattgtacctaaaa

SEQ ID NO: 19070 - RNA, 22 nt, synthetic construct
  misc_feature 1..22: note = Synthetic
  source 1..22: mol_type = other RNA
tttgtttttattgtacctaaaa

SEQ ID NO: 19071 - RNA, 23 nt, synthetic construct
  misc_feature 1..23: note = Synthetic
  source 1..23: mol_type = other RNA
ttttgtttttattgtacctaaaa

SEQ ID NO: 19072 - RNA, 24 nt, synthetic construct
  misc_feature 1..24: note = Synthetic
  source 1..24: mol_type = other RNA
gttttgtttttattgtacctaaaa

SEQ ID NO: 19073 - RNA, 18 nt, synthetic construct
  misc_feature 1..18: note = Synthetic
  source 1..18: mol_type = other RNA
ggaaacggctgcccccca

SEQ ID NO: 19074 - RNA, 19 nt, synthetic construct
  misc_feature 1..19: note = Synthetic
  source 1..19: mol_type = other RNA
gggaaacggctgcccccca

SEQ ID NO: 19075 - RNA, 20 nt, synthetic construct
  misc_feature 1..20: note = Synthetic
  source 1..20: mol_type = other RNA
cgggaaacggctgcccccca

SEQ ID NO: 19076 - RNA, 21 nt, synthetic construct
  misc_feature 1..21: note = Synthetic
  source 1..21: mol_type = other RNA
gcgggaaacggctgcccccca

SEQ ID NO: 19077 - RNA, 22 nt, synthetic construct
  misc_feature 1..22: note = Synthetic
  source 1..22: mol_type = other RNA
ggcgggaaacggctgcccccca

SEQ ID NO: 19078 - RNA, 23 nt, synthetic construct
  misc_feature 1..23: note = Synthetic
  source 1..23: mol_type = other RNA
cggcgggaaacggctgcccccca

SEQ ID NO: 19079 - RNA, 24 nt, synthetic construct
  misc_feature 1..24: note = Synthetic
  source 1..24: mol_type = other RNA
gcggcgggaaacggctgcccccca

SEQ ID NO: 19080 - RNA, 18 nt, synthetic construct
  misc_feature 1..18: note = Synthetic
  source 1..18: mol_type = other RNA
ccgcgccacgcctcgcca

SEQ ID NO: 19081 - RNA, 19 nt, synthetic construct
  misc_feature 1..19: note = Synthetic
  source 1..19: mol_type = other RNA
gccgcgccacgcctcgcca

SEQ ID NO: 19082 - RNA, 21 nt, synthetic construct
  misc_feature 1..21: note = Synthetic
  source 1..21: mol_type = other RNA
ctgccgcgccacgcctcgcca

SEQ ID NO: 19083 - RNA, 22 nt, synthetic construct
  misc_feature 1..22: note = Synthetic
  source 1..22: mol_type = other RNA
actgccgcgccacgcctcgcca

SEQ ID NO: 19084 - RNA, 23 nt, synthetic construct
  misc_feature 1..23: note = Synthetic
  source 1..23: mol_type = other RNA
cactgccgcgccacgcctcgcca

SEQ ID NO: 19085 - RNA, 24 nt, synthetic construct
  misc_feature 1..24: note = Synthetic
  source 1..24: mol_type = other RNA
tcactgccgcgccacgcctcgcca

SEQ ID NO: 19086 - RNA, 18 nt, synthetic construct
  misc_feature 1..18: note = Synthetic
  source 1..18: mol_type = other RNA
ctccttggcccgccagca

SEQ ID NO: 19087 - RNA, 19 nt, synthetic construct
  misc_feature 1..19: note = Synthetic
  source 1..19: mol_type = other RNA
cctccttggcccgccagca

SEQ ID NO: 19088 - RNA, 20 nt, synthetic construct
  misc_feature 1..20: note = Synthetic
  source 1..20: mol_type = other RNA
ccctccttggcccgccagca

SEQ ID NO: 19089 - RNA, 21 nt, synthetic construct
  misc_feature 1..21: note = Synthetic
  source 1..21: mol_type = other RNA
gccctccttggcccgccagca

SEQ ID NO: 19090 - RNA, 22 nt, synthetic construct
  misc_feature 1..22: note = Synthetic
  source 1..22: mol_type = other RNA
ggccctccttggcccgccagca

SEQ ID NO: 19091 - RNA, 23 nt, synthetic construct
  misc_feature 1..23: note = Synthetic
  source 1..23: mol_type = other RNA
gggccctccttggcccgccagca

SEQ ID NO: 19092 - RNA, 24 nt, synthetic construct
  misc_feature 1..24: note = Synthetic
  source 1..24: mol_type = other RNA
agggccctccttggcccgccagca

SEQ ID NO: 19093 - RNA, 18 nt, synthetic construct
  misc_feature 1..18: note = Synthetic
  source 1..18: mol_type = other RNA
tcgcgccttcaggtagca

SEQ ID NO: 19094 - RNA, 19 nt, synthetic construct
  misc_feature 1..19: note = Synthetic
  source 1..19: mol_type = other RNA
ctcgcgccttcaggtagca

SEQ ID NO: 19095 - RNA, 20 nt, synthetic construct
  misc_feature 1..20: note = Synthetic
  source 1..20: mol_type = other RNA
cctcgcgccttcaggtagca

SEQ ID NO: 19096 - RNA, 21 nt, synthetic construct
  misc_feature 1..21: note = Synthetic
  source 1..21: mol_type = other RNA
gcctcgcgccttcaggtagca

SEQ ID NO: 19097 - RNA, 22 nt, synthetic construct
  misc_feature 1..22: note = Synthetic
  source 1..22: mol_type = other RNA
ggcctcgcgccttcaggtagca

SEQ ID NO: 19098 - RNA, 23 nt, synthetic construct
  misc_feature 1..23: note = Synthetic
  source 1..23: mol_type = other RNA
aggcctcgcgccttcaggtagca

SEQ ID NO: 19099 - RNA, 24 nt, synthetic construct
  misc_feature 1..24: note = Synthetic
  source 1..24: mol_type = other RNA
caggcctcgcgccttcaggtagca

SEQ ID NO: 19100 - RNA, 18 nt, synthetic construct
  misc_feature 1..18: note = Synthetic
  source 1..18: mol_type = other RNA
cgtctggtctcggcgtca

SEQ ID NO: 19101 - RNA, 19 nt, synthetic construct
  misc_feature 1..19: note = Synthetic
  source 1..19: mol_type = other RNA
ccgtctggtctcggcgtca

SEQ ID NO: 19102 - RNA, 20 nt, synthetic construct
  misc_feature 1..20: note = Synthetic
  source 1..20: mol_type = other RNA
cccgtctggtctcggcgtca

SEQ ID NO: 19103 - RNA, 21 nt, synthetic construct
  misc_feature 1..21: note = Synthetic
  source 1..21: mol_type = other RNA
acccgtctggtctcggcgtca

SEQ ID NO: 19104 - RNA, 22 nt, synthetic construct
  misc_feature 1..22: note = Synthetic
  source 1..22: mol_type = other RNA
gacccgtctggtctcggcgtca

SEQ ID NO: 19105 - RNA, 23 nt, synthetic construct
  misc_feature 1..23: note = Synthetic
  source 1..23: mol_type = other RNA
agacccgtctggtctcggcgtca

SEQ ID NO: 19106 - RNA, 24 nt, synthetic construct
  misc_feature 1..24: note = Synthetic
  source 1..24: mol_type = other RNA
gagacccgtctggtctcggcgtca

SEQ ID NO: 19107 - RNA, 18 nt, synthetic construct
  misc_feature 1..18: note = Synthetic
  source 1..18: mol_type = other RNA
ccgccgcgcgctcggaga

SEQ ID NO: 19108 - RNA, 19 nt, synthetic construct
  misc_feature 1..19: note = Synthetic
  source 1..19: mol_type = other RNA
accgccgcgcgctcggaga

SEQ ID NO: 19109 - RNA, 21 nt, synthetic construct
  misc_feature 1..21: note = Synthetic
  source 1..21: mol_type = other RNA
cgaccgccgcgcgctcggaga

SEQ ID NO: 19110 - RNA, 22 nt, synthetic construct
  misc_feature 1..22: note = Synthetic
  source 1..22: mol_type = other RNA
tcgaccgccgcgcgctcggaga

SEQ ID NO: 19111 - RNA, 23 nt, synthetic construct
  misc_feature 1..23: note = Synthetic
  source 1..23: mol_type = other RNA
gtcgaccgccgcgcgctcggaga

SEQ ID NO: 19112 - RNA, 24 nt, synthetic construct
  misc_feature 1..24: note = Synthetic
  source 1..24: mol_type = other RNA
ggtcgaccgccgcgcgctcggaga

SEQ ID NO: 19113 - RNA, 18 nt, synthetic construct
  misc_feature 1..18: note = Synthetic
  source 1..18: mol_type = other RNA
ttcaggtagcactggaga

SEQ ID NO: 19114 - RNA, 19 nt, synthetic construct
  misc_feature 1..19: note = Synthetic
  source 1..19: mol_type = other RNA
cttcaggtagcactggaga

SEQ ID NO: 19115 - RNA, 20 nt, synthetic construct
  misc_feature 1..20: note = Synthetic
  source 1..20: mol_type = other RNA
ccttcaggtagcactggaga

SEQ ID NO: 19116 - RNA, 21 nt, synthetic construct
  misc_feature 1..21: note = Synthetic
  source 1..21: mol_type = other RNA
gccttcaggtagcactggaga

SEQ ID NO: 19117 - RNA, 22 nt, synthetic construct
  misc_feature 1..22: note = Synthetic
  source 1..22: mol_type = other RNA
cgccttcaggtagcactggaga

SEQ ID NO: 19118 - RNA, 23 nt, synthetic construct
  misc_feature 1..23: note = Synthetic
  source 1..23: mol_type = other RNA
gcgccttcaggtagcactggaga

SEQ ID NO: 19119 - RNA, 24 nt, synthetic construct
  misc_feature 1..24: note = Synthetic
  source 1..24: mol_type = other RNA
cgcgccttcaggtagcactggaga

SEQ ID NO: 19120 - RNA, 18 nt, synthetic construct
  misc_feature 1..18: note = Synthetic
  source 1..18: mol_type = other RNA
ttgccggcaaaagtgcga

SEQ ID NO: 19121 - RNA, 19 nt, synthetic construct
  misc_feature 1..19: note = Synthetic
  source 1..19: mol_type = other RNA
attgccggcaaaagtgcga

SEQ ID NO: 19122 - RNA, 20 nt, synthetic construct
  misc_feature 1..20: note = Synthetic
  source 1..20: mol_type = other RNA
gattgccggcaaaagtgcga

SEQ ID NO: 19123 - RNA, 21 nt, synthetic construct
  misc_feature 1..21: note = Synthetic
  source 1..21: mol_type = other RNA
ggattgccggcaaaagtgcga

SEQ ID NO: 19124 - RNA, 22 nt, synthetic construct
  misc_feature 1..22: note = Synthetic
  source 1..22: mol_type = other RNA
aggattgccggcaaaagtgcga

SEQ ID NO: 19125 - RNA, 23 nt, synthetic construct
  misc_feature 1..23: note = Synthetic
  source 1..23: mol_type = other RNA
gaggattgccggcaaaagtgcga

SEQ ID NO: 19126 - RNA, 24 nt, synthetic construct
  misc_feature 1..24: note = Synthetic
  source 1..24: mol_type = other RNA
cgaggattgccggcaaaagtgcga

SEQ ID NO: 19127 - RNA, 18 nt, synthetic construct
  misc_feature 1..18: note = Synthetic
  source 1..18: mol_type = other RNA
gccgcggtcgtcccgata

SEQ ID NO: 19128 - RNA, 19 nt, synthetic construct
  misc_feature 1..19: note = Synthetic
  source 1..19: mol_type = other RNA
agccgcggtcgtcccgata

SEQ ID NO: 19129 - RNA, 20 nt, synthetic construct
  misc_feature 1..20: note = Synthetic
  source 1..20: mol_type = other RNA
cagccgcggtcgtcccgata

SEQ ID NO: 19130 - RNA, 21 nt, synthetic construct
  misc_feature 1..21: note = Synthetic
  source 1..21: mol_type = other RNA
acagccgcggtcgtcccgata

SEQ ID NO: 19131 - RNA, 22 nt, synthetic construct
  misc_feature 1..22: note = Synthetic
  source 1..22: mol_type = other RNA
cacagccgcggtcgtcccgata

SEQ ID NO: 19132 - RNA, 23 nt, synthetic construct
  misc_feature 1..23: note = Synthetic
  source 1..23: mol_type = other RNA
gcacagccgcggtcgtcccgata

SEQ ID NO: 19133 - RNA, 24 nt, synthetic construct
  misc_feature 1..24: note = Synthetic
  source 1..24: mol_type = other RNA
agcacagccgcggtcgtcccgata

SEQ ID NO: 19134 - RNA, 18 nt, synthetic construct
  misc_feature 1..18: note = Synthetic
  source 1..18: mol_type = other RNA
atatttgccgtgcacgta

SEQ ID NO: 19135 - RNA, 19 nt, synthetic construct
  misc_feature 1..19: note = Synthetic
  source 1..19: mol_type = other RNA
aatatttgccgtgcacgta

SEQ ID NO: 19136 - RNA, 21 nt, synthetic construct
  misc_feature 1..21: note = Synthetic
  source 1..21: mol_type = other RNA
aaaatatttgccgtgcacgta

SEQ ID NO: 19137 - RNA, 22 nt, synthetic construct
  misc_feature 1..22: note = Synthetic
  source 1..22: mol_type = other RNA
aaaaatatttgccgtgcacgta

SEQ ID NO: 19138 - RNA, 23 nt, synthetic construct
  misc_feature 1..23: note = Synthetic
  source 1..23: mol_type = other RNA
taaaaatatttgccgtgcacgta

SEQ ID NO: 19139 - RNA, 24 nt, synthetic construct
  misc_feature 1..24: note = Synthetic
  source 1..24: mol_type = other RNA
ataaaaatatttgccgtgcacgta

SEQ ID NO: 19140 - RNA, 18 nt, synthetic construct
  misc_feature 1..18: note = Synthetic
  source 1..18: mol_type = other RNA
caatcgccagcgtcatta

SEQ ID NO: 19141 - RNA, 19 nt, synthetic construct
  misc_feature 1..19: note = Synthetic
  source 1..19: mol_type = other RNA
gcaatcgccagcgtcatta

SEQ ID NO: 19142 - RNA, 20 nt, synthetic construct
  misc_feature 1..20: note = Synthetic
  source 1..20: mol_type = other RNA
ggcaatcgccagcgtcatta

SEQ ID NO: 19143 - RNA, 21 nt, synthetic construct
  misc_feature 1..21: note = Synthetic
  source 1..21: mol_type = other RNA
gggcaatcgccagcgtcatta

SEQ ID NO: 19144 - RNA, 22 nt, synthetic construct
  misc_feature 1..22: note = Synthetic
  source 1..22: mol_type = other RNA
ggggcaatcgccagcgtcatta

SEQ ID NO: 19145 - RNA, 23 nt, synthetic construct
  misc_feature 1..23: note = Synthetic
  source 1..23: mol_type = other RNA
gggggcaatcgccagcgtcatta

SEQ ID NO: 19146 - RNA, 24 nt, synthetic construct
  misc_feature 1..24: note = Synthetic
  source 1..24: mol_type = other RNA
ggggggcaatcgccagcgtcatta

SEQ ID NO: 19147 - RNA, 18 nt, synthetic construct
  misc_feature 1..18: note = Synthetic
  source 1..18: mol_type = other RNA
ttttattgtacctaaaac

SEQ ID NO: 19148 - RNA, 19 nt, synthetic construct
  misc_feature 1..19: note = Synthetic
  source 1..19: mol_type = other RNA
tttttattgtacctaaaac

SEQ ID NO: 19149 - RNA, 21 nt, synthetic construct
  misc_feature 1..21: note = Synthetic
  source 1..21: mol_type = other RNA
tgtttttattgtacctaaaac

SEQ ID NO: 19150 - RNA, 22 nt, synthetic construct
  misc_feature 1..22: note = Synthetic
  source 1..22: mol_type = other RNA
ttgtttttattgtacctaaaac

SEQ ID NO: 19151 - RNA, 23 nt, synthetic construct
  misc_feature 1..23: note = Synthetic
  source 1..23: mol_type = other RNA
tttgtttttattgtacctaaaac

SEQ ID NO: 19152 - RNA, 24 nt, synthetic construct
  misc_feature 1..24: note = Synthetic
  source 1..24: mol_type = other RNA
ttttgtttttattgtacctaaaac

SEQ ID NO: 19153 - RNA, 18 nt, synthetic construct
  misc_feature 1..18: note = Synthetic
  source 1..18: mol_type = other RNA
ctggccagaatgacaaac

SEQ ID NO: 19154 - RNA, 19 nt, synthetic construct
  misc_feature 1..19: note = Synthetic
  source 1..19: mol_type = other RNA
cctggccagaatgacaaac

SEQ ID NO: 19155 - RNA, 20 nt, synthetic construct
  misc_feature 1..20: note = Synthetic
  source 1..20: mol_type = other RNA
gcctggccagaatgacaaac

SEQ ID NO: 19156 - RNA, 21 nt, synthetic construct
  misc_feature 1..21: note = Synthetic
  source 1..21: mol_type = other RNA
agcctggccagaatgacaaac

SEQ ID NO: 19157 - RNA, 22 nt, synthetic construct
  misc_feature 1..22: note = Synthetic
  source 1..22: mol_type = other RNA
gagcctggccagaatgacaaac

SEQ ID NO: 19158 - RNA, 23 nt, synthetic construct
  misc_feature 1..23: note = Synthetic
  source 1..23: mol_type = other RNA
cgagcctggccagaatgacaaac

SEQ ID NO: 19159 - RNA, 24 nt, synthetic construct
  misc_feature 1..24: note = Synthetic
  source 1..24: mol_type = other RNA
gcgagcctggccagaatgacaaac

SEQ ID NO: 19160 - RNA, 18 nt, synthetic construct
  misc_feature 1..18: note = Synthetic
  source 1..18: mol_type = other RNA
tccttggcccgccagcac

SEQ ID NO: 19161 - RNA, 19 nt, synthetic construct
  misc_feature 1..19: note = Synthetic
  source 1..19: mol_type = other RNA
ctccttggcccgccagcac

SEQ ID NO: 19162 - RNA, 21 nt, synthetic construct
  misc_feature 1..21: note = Synthetic
  source 1..21: mol_type = other RNA
ccctccttggcccgccagcac

SEQ ID NO: 19163 - RNA, 22 nt, synthetic construct
  misc_feature 1..22: note = Synthetic
  source 1..22: mol_type = other RNA
gccctccttggcccgccagcac

SEQ ID NO: 19164 - RNA, 23 nt, synthetic construct
  misc_feature 1..23: note = Synthetic
  source 1..23: mol_type = other RNA
ggccctccttggcccgccagcac

SEQ ID NO: 19165 - RNA, 24 nt, synthetic construct
  misc_feature 1..24: note = Synthetic
  source 1..24: mol_type = other RNA
gggccctccttggcccgccagcac

SEQ ID NO: 19166 - RNA, 18 nt, synthetic construct
  misc_feature 1..18: note = Synthetic
  source 1..18: mol_type = other RNA
cgcgccttcaggtagcac

SEQ ID NO: 19167 - RNA, 19 nt, synthetic construct
  misc_feature 1..19: note = Synthetic
  source 1..19: mol_type = other RNA
tcgcgccttcaggtagcac

SEQ ID NO: 19168 - RNA, 21 nt, synthetic construct
  misc_feature 1..21: note = Synthetic
  source 1..21: mol_type = other RNA
cctcgcgccttcaggtagcac

SEQ ID NO: 19169 - RNA, 22 nt, synthetic construct
  misc_feature 1..22: note = Synthetic
  source 1..22: mol_type = other RNA
gcctcgcgccttcaggtagcac

SEQ ID NO: 19170 - RNA, 23 nt, synthetic construct
  misc_feature 1..23: note = Synthetic
  source 1..23: mol_type = other RNA
ggcctcgcgccttcaggtagcac

SEQ ID NO: 19171 - RNA, 24 nt, synthetic construct
  misc_feature 1..24: note = Synthetic
  source 1..24: mol_type = other RNA
aggcctcgcgccttcaggtagcac

SEQ ID NO: 19172 - RNA, 18 nt, synthetic construct
  misc_feature 1..18: note = Synthetic
  source 1..18: mol_type = other RNA
tcaactcgcagacacgac

SEQ ID NO: 19173 - RNA, 19 nt, synthetic construct
  misc_feature 1..19: note = Synthetic
  source 1..19: mol_type = other RNA
gtcaactcgcagacacgac

SEQ ID NO: 19174 - RNA, 20 nt, synthetic construct
  misc_feature 1..20: note = Synthetic
  source 1..20: mol_type = other RNA
cgtcaactcgcagacacgac

SEQ ID NO: 19175 - RNA, 21 nt, synthetic construct
  misc_feature 1..21: note = Synthetic
  source 1..21: mol_type = other RNA
ccgtcaactcgcagacacgac

SEQ ID NO: 19176 - RNA, 22 nt, synthetic construct
  misc_feature 1..22: note = Synthetic
  source 1..22: mol_type = other RNA
gccgtcaactcgcagacacgac

SEQ ID NO: 19177 - RNA, 23 nt, synthetic construct
  misc_feature 1..23: note = Synthetic
  source 1..23: mol_type = other RNA
ggccgtcaactcgcagacacgac

SEQ ID NO: 19178 - RNA, 24 nt, synthetic construct
  misc_feature 1..24: note = Synthetic
  source 1..24: mol_type = other RNA
tggccgtcaactcgcagacacgac

SEQ ID NO: 19179 - RNA, 18 nt, synthetic construct
  misc_feature 1..18: note = Synthetic
  source 1..18: mol_type = other RNA
tatttgccgtgcacgtac

SEQ ID NO: 19180 - RNA, 19 nt, synthetic construct
  misc_feature 1..19: note = Synthetic
  source 1..19: mol_type = other RNA
atatttgccgtgcacgtac

SEQ ID NO: 19181 - RNA, 21 nt, synthetic construct
  misc_feature 1..21: note = Synthetic
  source 1..21: mol_type = other RNA
aaatatttgccgtgcacgtac

SEQ ID NO: 19182 - RNA, 22 nt, synthetic construct
  misc_feature 1..22: note = Synthetic
  source 1..22: mol_type = other RNA
aaaatatttgccgtgcacgtac

SEQ ID NO: 19183 - RNA, 23 nt, synthetic construct
  misc_feature 1..23: note = Synthetic
  source 1..23: mol_type = other RNA
aaaaatatttgccgtgcacgtac

SEQ ID NO: 19184 - RNA, 24 nt, synthetic construct
  misc_feature 1..24: note = Synthetic
  source 1..24: mol_type = other RNA
taaaaatatttgccgtgcacgtac

SEQ ID NO: 19185 - RNA, 18 nt, synthetic construct
  misc_feature 1..18: note = Synthetic
  source 1..18: mol_type = other RNA
gcccgccatgcaggcccc

SEQ ID NO: 19186 - RNA, 19 nt, synthetic construct
  misc_feature 1..19: note = Synthetic
  source 1..19: mol_type = other RNA
ggcccgccatgcaggcccc

SEQ ID NO: 19187 - RNA, 21 nt, synthetic construct
  misc_feature 1..21: note = Synthetic
  source 1..21: mol_type = other RNA
caggcccgccatgcaggcccc

SEQ ID NO: 19188 - RNA, 22 nt, synthetic construct
  misc_feature 1..22: note = Synthetic
  source 1..22: mol_type = other RNA
tcaggcccgccatgcaggcccc

SEQ ID NO: 19189 - RNA, 23 nt, synthetic construct
  misc_feature 1..23: note = Synthetic
  source 1..23: mol_type = other RNA
atcaggcccgccatgcaggcccc

SEQ ID NO: 19190 - RNA, 24 nt, synthetic construct
  misc_feature 1..24: note = Synthetic
  source 1..24: mol_type = other RNA
gatcaggcccgccatgcaggcccc

SEQ ID NO: 19191 - RNA, 18 nt, synthetic construct
  misc_feature 1..18: note = Synthetic
  source 1..18: mol_type = other RNA
cgtccgtccaccccgccc

SEQ ID NO: 19192 - RNA, 19 nt, synthetic construct
  misc_feature 1..19: note = Synthetic
  source 1..19: mol_type = other RNA
ccgtccgtccaccccgccc

SEQ ID NO: 19193 - RNA, 21 nt, synthetic construct
  misc_feature 1..21: note = Synthetic
  source 1..21: mol_type = other RNA
ggccgtccgtccaccccgccc

SEQ ID NO: 19194 - RNA, 22 nt, synthetic construct
  misc_feature 1..22: note = Synthetic
  source 1..22: mol_type = other RNA
gggccgtccgtccaccccgccc

SEQ ID NO: 19195 - RNA, 23 nt, synthetic construct
  misc_feature 1..23: note = Synthetic
  source 1..23: mol_type = other RNA
ggggccgtccgtccaccccgccc

SEQ ID NO: 19196 - RNA, 24 nt, synthetic construct
  misc_feature 1..24: note = Synthetic
  source 1..24: mol_type = other RNA
cggggccgtccgtccaccccgccc

SEQ ID NO: 19197 - RNA, 18 nt, synthetic construct
  misc_feature 1..18: note = Synthetic
  source 1..18: mol_type = other RNA
ggcccgccatgcaggccc

SEQ ID NO: 19198 - RNA, 19 nt, synthetic construct
  misc_feature 1..19: note = Synthetic
  source 1..19: mol_type = other RNA
aggcccgccatgcaggccc

SEQ ID NO: 19199 - RNA, 21 nt, synthetic construct
  misc_feature 1..21: note = Synthetic
  source 1..21: mol_type = other RNA
tcaggcccgccatgcaggccc

SEQ ID NO: 19200 - RNA, 22 nt, synthetic construct
  misc_feature 1..22: note = Synthetic
  source 1..22: mol_type = other RNA
atcaggcccgccatgcaggccc

SEQ ID NO: 19201 - RNA, 23 nt, synthetic construct
  misc_feature 1..23: note = Synthetic
  source 1..23: mol_type = other RNA
gatcaggcccgccatgcaggccc

SEQ ID NO: 19202 - RNA, 24 nt, synthetic construct
  misc_feature 1..24: note = Synthetic
  source 1..24: mol_type = other RNA
cgatcaggcccgccatgcaggccc

SEQ ID NO: 19203 - RNA, 18 nt, synthetic construct
  misc_feature 1..18: note = Synthetic
  source 1..18: mol_type = other RNA
ccgccagcaccggggccc

SEQ ID NO: 19204 - RNA, 19 nt, synthetic construct
  misc_feature 1..19: note = Synthetic
  source 1..19: mol_type = other RNA
cccgccagcaccggggccc

SEQ ID NO: 19205 - RNA, 21 nt, synthetic construct
  misc_feature 1..21: note = Synthetic
  source 1..21: mol_type = other RNA
ggcccgccagcaccggggccc

SEQ ID NO: 19206 - RNA, 22 nt, synthetic construct
  misc_feature 1..22: note = Synthetic
  source 1..22: mol_type = other RNA
tggcccgccagcaccggggccc

SEQ ID NO: 19207 - RNA, 23 nt, synthetic construct
  misc_feature 1..23: note = Synthetic
  source 1..23: mol_type = other RNA
ttggcccgccagcaccggggccc

SEQ ID NO: 19208 - RNA, 24 nt, synthetic construct
  misc_feature 1..24: note = Synthetic
  source 1..24: mol_type = other RNA
cttggcccgccagcaccggggccc

SEQ ID NO: 19209 - RNA, 18 nt, synthetic construct
  misc_feature 1..18: note = Synthetic
  source 1..18: mol_type = other RNA
gggcgaccaaggtttccc

SEQ ID NO: 19210 - RNA, 19 nt, synthetic construct
  misc_feature 1..19: note = Synthetic
  source 1..19: mol_type = other RNA
tgggcgaccaaggtttccc

SEQ ID NO: 19211 - RNA, 21 nt, synthetic construct
  misc_feature 1..21: note = Synthetic
  source 1..21: mol_type = other RNA
cgtgggcgaccaaggtttccc

SEQ ID NO: 19212 - RNA, 22 nt, synthetic construct
  misc_feature 1..22: note = Synthetic
  source 1..22: mol_type = other RNA
ccgtgggcgaccaaggtttccc

SEQ ID NO: 19213 - RNA, 23 nt, synthetic construct
  misc_feature 1..23: note = Synthetic
  source 1..23: mol_type = other RNA
gccgtgggcgaccaaggtttccc

SEQ ID NO: 19214 - RNA, 24 nt, synthetic construct
  misc_feature 1..24: note = Synthetic
  source 1..24: mol_type = other RNA
ggccgtgggcgaccaaggtttccc

SEQ ID NO: 19215 - RNA, 18 nt, synthetic construct
  misc_feature 1..18: note = Synthetic
  source 1..18: mol_type = other RNA
ccgtccgtccaccccgcc

SEQ ID NO: 19216 - RNA, 19 nt, synthetic construct
  misc_feature 1..19: note = Synthetic
  source 1..19: mol_type = other RNA
gccgtccgtccaccccgcc

SEQ ID NO: 19217 - RNA, 20 nt, synthetic construct
  misc_feature 1..20: note = Synthetic
  source 1..20: mol_type = other RNA
ggccgtccgtccaccccgcc

SEQ ID NO: 19218 - RNA, 21 nt, synthetic construct
  misc_feature 1..21: note = Synthetic
  source 1..21: mol_type = other RNA
gggccgtccgtccaccccgcc

SEQ ID NO: 19219 - RNA, 22 nt, synthetic construct
  misc_feature 1..22: note = Synthetic
  source 1..22: mol_type = other RNA
ggggccgtccgtccaccccgcc

SEQ ID NO: 19220 - RNA, 23 nt, synthetic construct
  misc_feature 1..23: note = Synthetic
  source 1..23: mol_type = other RNA
cggggccgtccgtccaccccgcc

SEQ ID NO: 19221 - RNA, 24 nt, synthetic construct
  misc_feature 1..24: note = Synthetic
  source 1..24: mol_type = other RNA
ccggggccgtccgtccaccccgcc

SEQ ID NO: 19222 - RNA, 18 nt, synthetic construct
  misc_feature 1..18: note = Synthetic
  source 1..18: mol_type = other RNA
tgtccgccagacgccgcc

SEQ ID NO: 19223 - RNA, 19 nt, synthetic construct
  misc_feature 1..19: note = Synthetic
  source 1..19: mol_type = other RNA
atgtccgccagacgccgcc

SEQ ID NO: 19224 - RNA, 21 nt, synthetic construct
  misc_feature 1..21: note = Synthetic
  source 1..21: mol_type = other RNA
taatgtccgccagacgccgcc

SEQ ID NO: 19225 - RNA, 22 nt, synthetic construct
  misc_feature 1..22: note = Synthetic
  source 1..22: mol_type = other RNA
ttaatgtccgccagacgccgcc

SEQ ID NO: 19226 - RNA, 23 nt, synthetic construct
  misc_feature 1..23: note = Synthetic
  source 1..23: mol_type = other RNA
cttaatgtccgccagacgccgcc

SEQ ID NO: 19227 - RNA, 24 nt, synthetic construct
  misc_feature 1..24: note = Synthetic
  source 1..24: mol_type = other RNA
ccttaatgtccgccagacgccgcc

SEQ ID NO: 19228 - RNA, 18 nt, synthetic construct
  misc_feature 1..18: note = Synthetic
  source 1..18: mol_type = other RNA
gccgcgccacgcctcgcc

SEQ ID NO: 19229 - RNA, 19 nt, synthetic construct
  misc_feature 1..19: note = Synthetic
  source 1..19: mol_type = other RNA
tgccgcgccacgcctcgcc

SEQ ID NO: 19230 - RNA, 20 nt, synthetic construct
  misc_feature 1..20: note = Synthetic
  source 1..20: mol_type = other RNA
ctgccgcgccacgcctcgcc

SEQ ID NO: 19231 - RNA, 21 nt, synthetic construct
  misc_feature 1..21: note = Synthetic
  source 1..21: mol_type = other RNA
actgccgcgccacgcctcgcc

SEQ ID NO: 19232 - RNA, 22 nt, synthetic construct
  misc_feature 1..22: note = Synthetic
  source 1..22: mol_type = other RNA
cactgccgcgccacgcctcgcc

SEQ ID NO: 19233 - RNA, 23 nt, synthetic construct
  misc_feature 1..23: note = Synthetic
  source 1..23: mol_type = other RNA
tcactgccgcgccacgcctcgcc

SEQ ID NO: 19234 - RNA, 24 nt, synthetic construct
  misc_feature 1..24: note = Synthetic
  source 1..24: mol_type = other RNA
ctcactgccgcgccacgcctcgcc

SEQ ID NO: 19235 - RNA, 18 nt, synthetic construct
  misc_feature 1..18: note = Synthetic
  source 1..18: mol_type = other RNA
aggcccgccatgcaggcc

SEQ ID NO: 19236 - RNA, 19 nt, synthetic construct
  misc_feature 1..19: note = Synthetic
  source 1..19: mol_type = other RNA
caggcccgccatgcaggcc

SEQ ID NO: 19237 - RNA, 21 nt, synthetic construct
  misc_feature 1..21: note = Synthetic
  source 1..21: mol_type = other RNA
atcaggcccgccatgcaggcc

SEQ ID NO: 19238 - RNA, 22 nt, synthetic construct
  misc_feature 1..22: note = Synthetic
  source 1..22: mol_type = other RNA
gatcaggcccgccatgcaggcc

SEQ ID NO: 19239 - RNA, 23 nt, synthetic construct
  misc_feature 1..23: note = Synthetic
  source 1..23: mol_type = other RNA
cgatcaggcccgccatgcaggcc

SEQ ID NO: 19240 - RNA, 24 nt, synthetic construct
  misc_feature 1..24: note = Synthetic
  source 1..24: mol_type = other RNA
tcgatcaggcccgccatgcaggcc

SEQ ID NO: 19241 - RNA, 18 nt, synthetic construct
  misc_feature 1..18: note = Synthetic
  source 1..18: mol_type = other RNA
gcgatagaggctcgggcc

SEQ ID NO: 19242 - RNA, 19 nt, synthetic construct
  misc_feature 1..19: note = Synthetic
  source 1..19: mol_type = other RNA
tgcgatagaggctcgggcc

SEQ ID NO: 19243 - RNA, 20 nt, synthetic construct
  misc_feature 1..20: note = Synthetic
  source 1..20: mol_type = other RNA
gtgcgatagaggctcgggcc

SEQ ID NO: 19244 - RNA, 21 nt, synthetic construct
  misc_feature 1..21: note = Synthetic
  source 1..21: mol_type = other RNA
agtgcgatagaggctcgggcc

SEQ ID NO: 19245 - RNA, 22 nt, synthetic construct
  misc_feature 1..22: note = Synthetic
  source 1..22: mol_type = other RNA
aagtgcgatagaggctcgggcc

SEQ ID NO: 19246 - RNA, 23 nt, synthetic construct
  misc_feature 1..23: note = Synthetic
  source 1..23: mol_type = other RNA
aaagtgcgatagaggctcgggcc

SEQ ID NO: 19247 - RNA, 24 nt, synthetic construct
  misc_feature 1..24: note = Synthetic
  source 1..24: mol_type = other RNA
aaaagtgcgatagaggctcgggcc

SEQ ID NO: 19248 - RNA, 18 nt, synthetic construct
  misc_feature 1..18: note = Synthetic
  source 1..18: mol_type = other RNA
cccgccagcaccggggcc

SEQ ID NO: 19249 - RNA, 19 nt, synthetic construct
  misc_feature 1..19: note = Synthetic
  source 1..19: mol_type = other RNA
gcccgccagcaccggggcc

SEQ ID NO: 19250 - RNA, 21 nt, synthetic construct
  misc_feature 1..21: note = Synthetic
  source 1..21: mol_type = other RNA
tggcccgccagcaccggggcc

SEQ ID NO: 19251 - RNA, 22 nt, synthetic construct
  misc_feature 1..22: note = Synthetic
  source 1..22: mol_type = other RNA
ttggcccgccagcaccggggcc

SEQ ID NO: 19252 - RNA, 23 nt, synthetic construct
  misc_feature 1..23: note = Synthetic
  source 1..23: mol_type = other RNA
cttggcccgccagcaccggggcc

SEQ ID NO: 19253 - RNA, 24 nt, synthetic construct
  misc_feature 1..24: note = Synthetic
  source 1..24: mol_type = other RNA
ccttggcccgccagcaccggggcc

SEQ ID NO: 19254 - RNA, 18 nt, synthetic construct
  misc_feature 1..18: note = Synthetic
  source 1..18: mol_type = other RNA
gccggggcgcgggggtcc

SEQ ID NO: 19255 - RNA, 19 nt, synthetic construct
  misc_feature 1..19: note = Synthetic
  source 1..19: mol_type = other RNA
ggccggggcgcgggggtcc

SEQ ID NO: 19256 - RNA, 21 nt, synthetic construct
  misc_feature 1..21: note = Synthetic
  source 1..21: mol_type = other RNA
ggggccggggcgcgggggtcc

SEQ ID NO: 19257 - RNA, 22 nt, synthetic construct
  misc_feature 1..22: note = Synthetic
  source 1..22: mol_type = other RNA
cggggccggggcgcgggggtcc

SEQ ID NO: 19258 - RNA, 23 nt, synthetic construct
  misc_feature 1..23: note = Synthetic
  source 1..23: mol_type = other RNA
ccggggccggggcgcgggggtcc

SEQ ID NO: 19259 - RNA, 24 nt, synthetic construct
  misc_feature 1..24: note = Synthetic
  source 1..24: mol_type = other RNA
tccggggccggggcgcgggggtcc

SEQ ID NO: 19260 - RNA, 18 nt, synthetic construct
  misc_feature 1..18: note = Synthetic
  source 1..18: mol_type = other RNA
gtcccgataatggggtcc

SEQ ID NO: 19261 - RNA, 19 nt, synthetic construct
  misc_feature 1..19: note = Synthetic
  source 1..19: mol_type = other RNA
cgtcccgataatggggtcc

SEQ ID NO: 19262 - RNA, 21 nt, synthetic construct
  misc_feature 1..21: note = Synthetic
  source 1..21: mol_type = other RNA
gtcgtcccgataatggggtcc

SEQ ID NO: 19263 - RNA, 22 nt, synthetic construct
  misc_feature 1..22: note = Synthetic
  source 1..22: mol_type = other RNA
ggtcgtcccgataatggggtcc

SEQ ID NO: 19264 - RNA, 23 nt, synthetic construct
  misc_feature 1..23: note = Synthetic
  source 1..23: mol_type = other RNA
cggtcgtcccgataatggggtcc

SEQ ID NO: 19265 - RNA, 24 nt, synthetic construct
  misc_feature 1..24: note = Synthetic
  source 1..24: mol_type = other RNA
gcggtcgtcccgataatggggtcc

SEQ ID NO: 19266 - RNA, 18 nt, synthetic construct
  misc_feature 1..18: note = Synthetic
  source 1..18: mol_type = other RNA
tgggcgaccaaggtttcc

SEQ ID NO: 19267 - RNA, 19 nt, synthetic construct
  misc_feature 1..19: note = Synthetic
  source 1..19: mol_type = other RNA
gtgggcgaccaaggtttcc

SEQ ID NO: 19268 - RNA, 20 nt, synthetic construct
  misc_feature 1..20: note = Synthetic
  source 1..20: mol_type = other RNA
cgtgggcgaccaaggtttcc

SEQ ID NO: 19269 - RNA, 21 nt, synthetic construct
  misc_feature 1..21: note = Synthetic
  source 1..21: mol_type = other RNA
ccgtgggcgaccaaggtttcc

SEQ ID NO: 19270 - RNA, 22 nt, synthetic construct
  misc_feature 1..22: note = Synthetic
  source 1..22: mol_type = other RNA
gccgtgggcgaccaaggtttcc

SEQ ID NO: 19271 - RNA, 23 nt, synthetic construct
  misc_feature 1..23: note = Synthetic
  source 1..23: mol_type = other RNA
ggccgtgggcgaccaaggtttcc

SEQ ID NO: 19272 - RNA, 24 nt, synthetic construct
  misc_feature 1..24: note = Synthetic
  source 1..24: mol_type = other RNA
gggccgtgggcgaccaaggtttcc

SEQ ID NO: 19273 - RNA, 18 nt, synthetic construct
  misc_feature 1..18: note = Synthetic
  source 1..18: mol_type = other RNA
atcgccagcgtcattagc

SEQ ID NO: 19274 - RNA, 19 nt, synthetic construct
  misc_feature 1..19: note = Synthetic
  source 1..19: mol_type = other RNA
aatcgccagcgtcattagc

SEQ ID NO: 19275 - RNA, 21 nt, synthetic construct
  misc_feature 1..21: note = Synthetic
  source 1..21: mol_type = other RNA
gcaatcgccagcgtcattagc

SEQ ID NO: 19276 - RNA, 22 nt, synthetic construct
  misc_feature 1..22: note = Synthetic
  source 1..22: mol_type = other RNA
ggcaatcgccagcgtcattagc

SEQ ID NO: 19277 - RNA, 23 nt, synthetic construct
  misc_feature 1..23: note = Synthetic
  source 1..23: mol_type = other RNA
gggcaatcgccagcgtcattagc

SEQ ID NO: 19278 - RNA, 24 nt, synthetic construct
  misc_feature 1..24: note = Synthetic
  source 1..24: mol_type = other RNA
ggggcaatcgccagcgtcattagc

SEQ ID NO: 19279 - RNA, 18 nt, synthetic construct
  misc_feature 1..18: note = Synthetic
  source 1..18: mol_type = other RNA
cggtcgaccgccgcgcgc

SEQ ID NO: 19280 - RNA, 19 nt, synthetic construct
  misc_feature 1..19: note = Synthetic
  source 1..19: mol_type = other RNA
gcggtcgaccgccgcgcgc

SEQ ID NO: 19281 - RNA, 20 nt, synthetic construct
  misc_feature 1..20: note = Synthetic
  source 1..20: mol_type = other RNA
tgcggtcgaccgccgcgcgc

SEQ ID NO: 19282 - RNA, 21 nt, synthetic construct
  misc_feature 1..21: note = Synthetic
  source 1..21: mol_type = other RNA
atgcggtcgaccgccgcgcgc

SEQ ID NO: 19283 - RNA, 22 nt, synthetic construct
  misc_feature 1..22: note = Synthetic
  source 1..22: mol_type = other RNA
gatgcggtcgaccgccgcgcgc

SEQ ID NO: 19284 - RNA, 23 nt, synthetic construct
  misc_feature 1..23: note = Synthetic
  source 1..23: mol_type = other RNA
tgatgcggtcgaccgccgcgcgc

SEQ ID NO: 19285 - RNA, 24 nt, synthetic construct
  misc_feature 1..24: note = Synthetic
  source 1..24: mol_type = other RNA
ctgatgcggtcgaccgccgcgcgc

SEQ ID NO: 19286 - RNA, 18 nt, synthetic construct
  misc_feature 1..18: note = Synthetic
  source 1..18: mol_type = other RNA
cctcgccatggggggcgc

SEQ ID NO: 19287 - RNA, 19 nt, synthetic construct
  misc_feature 1..19: note = Synthetic
  source 1..19: mol_type = other RNA
gcctcgccatggggggcgc

SEQ ID NO: 19288 - RNA, 21 nt, synthetic construct
  misc_feature 1..21: note = Synthetic
  source 1..21: mol_type = other RNA
acgcctcgccatggggggcgc

SEQ ID NO: 19289 - RNA, 22 nt, synthetic construct
  misc_feature 1..22: note = Synthetic
  source 1..22: mol_type = other RNA
cacgcctcgccatggggggcgc

SEQ ID NO: 19290 - RNA, 23 nt, synthetic construct
  misc_feature 1..23: note = Synthetic
  source 1..23: mol_type = other RNA
ccacgcctcgccatggggggcgc

SEQ ID NO: 19291 - RNA, 24 nt, synthetic construct
  misc_feature 1..24: note = Synthetic
  source 1..24: mol_type = other RNA
gccacgcctcgccatggggggcgc

SEQ ID NO: 19292 - RNA, 18 nt, synthetic construct
  misc_feature 1..18: note = Synthetic
  source 1..18: mol_type = other RNA
caaaagtgcgatagaggc

SEQ ID NO: 19293 - RNA, 19 nt, synthetic construct
  misc_feature 1..19: note = Synthetic
  source 1..19: mol_type = other RNA
gcaaaagtgcgatagaggc

SEQ ID NO: 19294 - RNA, 20 nt, synthetic construct
  misc_feature 1..20: note = Synthetic
  source 1..20: mol_type = other RNA
ggcaaaagtgcgatagaggc

SEQ ID NO: 19295 - RNA, 21 nt, synthetic construct
  misc_feature 1..21: note = Synthetic
  source 1..21: mol_type = other RNA
cggcaaaagtgcgatagaggc

SEQ ID NO: 19296 - RNA, 22 nt, synthetic construct
  misc_feature 1..22: note = Synthetic
  source 1..22: mol_type = other RNA
ccggcaaaagtgcgatagaggc

SEQ ID NO: 19297 - RNA, 23 nt, synthetic construct
  misc_feature 1..23: note = Synthetic
  source 1..23: mol_type = other RNA
gccggcaaaagtgcgatagaggc

SEQ ID NO: 19298 - RNA, 24 nt, synthetic construct
  misc_feature 1..24: note = Synthetic
  source 1..24: mol_type = other RNA
tgccggcaaaagtgcgatagaggc

SEQ ID NO: 19299 - RNA, 18 nt, synthetic construct
  misc_feature 1..18: note = Synthetic
  source 1..18: mol_type = other RNA
ccaggggctattcgcggc

SEQ ID NO: 19300 - RNA, 19 nt, synthetic construct
  misc_feature 1..19: note = Synthetic
  source 1..19: mol_type = other RNA
cccaggggctattcgcggc

SEQ ID NO: 19301 - RNA, 21 nt, synthetic construct
  misc_feature 1..21: note = Synthetic
  source 1..21: mol_type = other RNA
ggcccaggggctattcgcggc

SEQ ID NO: 19302 - RNA, 22 nt, synthetic construct
  misc_feature 1..22: note = Synthetic
  source 1..22: mol_type = other RNA
gggcccaggggctattcgcggc

SEQ ID NO: 19303 - RNA, 23 nt, synthetic construct
  misc_feature 1..23: note = Synthetic
  source 1..23: mol_type = other RNA
ggggcccaggggctattcgcggc

SEQ ID NO: 19304 - RNA, 24 nt, synthetic construct
  misc_feature 1..24: note = Synthetic
  source 1..24: mol_type = other RNA
cggggcccaggggctattcgcggc

SEQ ID NO: 19305 - RNA, 18 nt, synthetic construct
  misc_feature 1..18: note = Synthetic
  source 1..18: mol_type = other RNA
cttggcggtcgatgcggc

SEQ ID NO: 19306 - RNA, 19 nt, synthetic construct
  misc_feature 1..19: note = Synthetic
  source 1..19: mol_type = other RNA
ccttggcggtcgatgcggc

SEQ ID NO: 19307 - RNA, 20 nt, synthetic construct
  misc_feature 1..20: note = Synthetic
  source 1..20: mol_type = other RNA
gccttggcggtcgatgcggc

SEQ ID NO: 19308 - RNA, 21 nt, synthetic construct
  misc_feature 1..21: note = Synthetic
  source 1..21: mol_type = other RNA
ggccttggcggtcgatgcggc

SEQ ID NO: 19309 - RNA, 22 nt, synthetic construct
  misc_feature 1..22: note = Synthetic
  source 1..22: mol_type = other RNA
tggccttggcggtcgatgcggc

SEQ ID NO: 19310 - RNA, 23 nt, synthetic construct
  misc_feature 1..23: note = Synthetic
  source 1..23: mol_type = other RNA
atggccttggcggtcgatgcggc

SEQ ID NO: 19311 - RNA, 24 nt, synthetic construct
  misc_feature 1..24: note = Synthetic
  source 1..24: mol_type = other RNA
catggccttggcggtcgatgcggc

SEQ ID NO: 19312 - RNA, 18 nt, synthetic construct
  misc_feature 1..18: note = Synthetic
  source 1..18: mol_type = other RNA
gcgcgggggtccgcgggc

SEQ ID NO: 19313 - RNA, 19 nt, synthetic construct
  misc_feature 1..19: note = Synthetic
  source 1..19: mol_type = other RNA
ggcgcgggggtccgcgggc

SEQ ID NO: 19314 - RNA, 21 nt, synthetic construct
  misc_feature 1..21: note = Synthetic
  source 1..21: mol_type = other RNA
ggggcgcgggggtccgcgggc

SEQ ID NO: 19315 - RNA, 22 nt, synthetic construct
  misc_feature 1..22: note = Synthetic
  source 1..22: mol_type = other RNA
cggggcgcgggggtccgcgggc

SEQ ID NO: 19316 - RNA, 23 nt, synthetic construct
  misc_feature 1..23: note = Synthetic
  source 1..23: mol_type = other RNA
ccggggcgcgggggtccgcgggc

SEQ ID NO: 19317 - RNA, 24 nt, synthetic construct
  misc_feature 1..24: note = Synthetic
  source 1..24: mol_type = other RNA
gccggggcgcgggggtccgcgggc

SEQ ID NO: 19318 - RNA, 18 nt, synthetic construct
  misc_feature 1..18: note = Synthetic
  source 1..18: mol_type = other RNA
tcgctccggggccggggc

SEQ ID NO: 19319 - RNA, 19 nt, synthetic construct
  misc_feature 1..19: note = Synthetic
  source 1..19: mol_type = other RNA
ttcgctccggggccggggc

SEQ ID NO: 19320 - RNA, 20 nt, synthetic construct
  misc_feature 1..20: note = Synthetic
  source 1..20: mol_type = other RNA
tttcgctccggggccggggc

SEQ ID NO: 19321 - RNA, 21 nt, synthetic construct
  misc_feature 1..21: note = Synthetic
  source 1..21: mol_type = other RNA
ctttcgctccggggccggggc

SEQ ID NO: 19322 - RNA, 22 nt, synthetic construct
  misc_feature 1..22: note = Synthetic
  source 1..22: mol_type = other RNA
cctttcgctccggggccggggc

SEQ ID NO: 19323 - RNA, 23 nt, synthetic construct
  misc_feature 1..23: note = Synthetic
  source 1..23: mol_type = other RNA
gcctttcgctccggggccggggc

SEQ ID NO: 19324 - RNA, 24 nt, synthetic construct
  misc_feature 1..24: note = Synthetic
  source 1..24: mol_type = other RNA
cgcctttcgctccggggccggggc

SEQ ID NO: 19325 - RNA, 18 nt, synthetic construct
  misc_feature 1..18: note = Synthetic
  source 1..18: mol_type = other RNA
cgcctttcgctccggggc

SEQ ID NO: 19326 - RNA, 19 nt, synthetic construct
  misc_feature 1..19: note = Synthetic
  source 1..19: mol_type = other RNA
gcgcctttcgctccggggc

SEQ ID NO: 19327 - RNA, 21 nt, synthetic construct
  misc_feature 1..21: note = Synthetic
  source 1..21: mol_type = other RNA
gggcgcctttcgctccggggc

SEQ ID NO: 19328 - RNA, 22 nt, synthetic construct
  misc_feature 1..22: note = Synthetic
  source 1..22: mol_type = other RNA
cgggcgcctttcgctccggggc

SEQ ID NO: 19329 - RNA, 23 nt, synthetic construct
  misc_feature 1..23: note = Synthetic
  source 1..23: mol_type = other RNA
gcgggcgcctttcgctccggggc

SEQ ID NO: 19330 - RNA, 24 nt, synthetic construct
  misc_feature 1..24: note = Synthetic
  source 1..24: mol_type = other RNA
ggcgggcgcctttcgctccggggc

SEQ ID NO: 19331 - RNA, 18 nt, synthetic construct
  misc_feature 1..18: note = Synthetic
  source 1..18: mol_type = other RNA
ggcgggcgcctttcgctc

SEQ ID NO: 19332 - RNA, 19 nt, synthetic construct
  misc_feature 1..19: note = Synthetic
  source 1..19: mol_type = other RNA
cggcgggcgcctttcgctc

SEQ ID NO: 19333 - RNA, 21 nt, synthetic construct
  misc_feature 1..21: note = Synthetic
  source 1..21: mol_type = other RNA
ggcggcgggcgcctttcgctc

SEQ ID NO: 19334 - RNA, 22 nt, synthetic construct
  misc_feature 1..22: note = Synthetic
  source 1..22: mol_type = other RNA
cggcggcgggcgcctttcgctc

SEQ ID NO: 19335 - RNA, 23 nt, synthetic construct
  misc_feature 1..23: note = Synthetic
  source 1..23: mol_type = other RNA
tcggcggcgggcgcctttcgctc

SEQ ID NO: 19336 - RNA, 24 nt, synthetic construct
  misc_feature 1..24: note = Synthetic
  source 1..24: mol_type = other RNA
gtcggcggcgggcgcctttcgctc

SEQ ID NO: 19337 - RNA, 18 nt, synthetic construct
  misc_feature 1..18: note = Synthetic
  source 1..18: mol_type = other RNA
cgtcccgataatggggtc

SEQ ID NO: 19338 - RNA, 19 nt, synthetic construct
  misc_feature 1..19: note = Synthetic
  source 1..19: mol_type = other RNA
tcgtcccgataatggggtc

SEQ ID NO: 19339 - RNA, 20 nt, synthetic construct
  misc_feature 1..20: note = Synthetic
  source 1..20: mol_type = other RNA
gtcgtcccgataatggggtc

SEQ ID NO: 19340 - RNA, 21 nt, synthetic construct
  misc_feature 1..21: note = Synthetic
  source 1..21: mol_type = other RNA
ggtcgtcccgataatggggtc

SEQ ID NO: 19341 - RNA, 22 nt, synthetic construct
  misc_feature 1..22: note = Synthetic
  source 1..22: mol_type = other RNA
cggtcgtcccgataatggggtc

SEQ ID NO: 19342 - RNA, 23 nt, synthetic construct
  misc_feature 1..23: note = Synthetic
  source 1..23: mol_type = other RNA
gcggtcgtcccgataatggggtc

SEQ ID NO: 19343 - RNA, 24 nt, synthetic construct
  misc_feature 1..24: note = Synthetic
  source 1..24: mol_type = other RNA
cgcggtcgtcccgataatggggtc

SEQ ID NO: 19344 - RNA, 18 nt, synthetic construct
  misc_feature 1..18: note = Synthetic
  source 1..18: mol_type = other RNA
accgccgcgcgctcggag

SEQ ID NO: 19345 - RNA, 19 nt, synthetic construct
  misc_feature 1..19: note = Synthetic
  source 1..19: mol_type = other RNA
gaccgccgcgcgctcggag

SEQ ID NO: 19346 - RNA, 20 nt, synthetic construct
  misc_feature 1..20: note = Synthetic
  source 1..20: mol_type = other RNA
cgaccgccgcgcgctcggag

SEQ ID NO: 19347 - RNA, 21 nt, synthetic construct
  misc_feature 1..21: note = Synthetic
  source 1..21: mol_type = other RNA
tcgaccgccgcgcgctcggag

SEQ ID NO: 19348 - RNA, 22 nt, synthetic construct
  misc_feature 1..22: note = Synthetic
  source 1..22: mol_type = other RNA
gtcgaccgccgcgcgctcggag

SEQ ID NO: 19349 - RNA, 23 nt, synthetic construct
  misc_feature 1..23: note = Synthetic
  source 1..23: mol_type = other RNA
ggtcgaccgccgcgcgctcggag

SEQ ID NO: 19350 - RNA, 24 nt, synthetic construct
  misc_feature 1..24: note = Synthetic
  source 1..24: mol_type = other RNA
cggtcgaccgccgcgcgctcggag

SEQ ID NO: 19351 - RNA, 18 nt, synthetic construct
  misc_feature 1..18: note = Synthetic
  source 1..18: mol_type = other RNA
aatcgccagcgtcattag

SEQ ID NO: 19352 - RNA, 19 nt, synthetic construct
  misc_feature 1..19: note = Synthetic
  source 1..19: mol_type = other RNA
caatcgccagcgtcattag

SEQ ID NO: 19353 - RNA, 21 nt, synthetic construct
  misc_feature 1..21: note = Synthetic
  source 1..21: mol_type = other RNA
ggcaatcgccagcgtcattag

SEQ ID NO: 19354 - RNA, 22 nt, synthetic construct
  misc_feature 1..22: note = Synthetic
  source 1..22: mol_type = other RNA
gggcaatcgccagcgtcattag

SEQ ID NO: 19355 - RNA, 23 nt, synthetic construct
  misc_feature 1..23: note = Synthetic
  source 1..23: mol_type = other RNA
ggggcaatcgccagcgtcattag

SEQ ID NO: 19356 - RNA, 24 nt, synthetic construct
  misc_feature 1..24: note = Synthetic
  source 1..24: mol_type = other RNA
gggggcaatcgccagcgtcattag

SEQ ID NO: 19357 - RNA, 18 nt, synthetic construct
  misc_feature 1..18: note = Synthetic
  source 1..18: mol_type = other RNA
atttgccgtgcacgtacg

SEQ ID NO: 19358 - RNA, 19 nt, synthetic construct
  misc_feature 1..19: note = Synthetic
  source 1..19: mol_type = other RNA
tatttgccgtgcacgtacg

SEQ ID NO: 19359 - RNA, 21 nt, synthetic construct
  misc_feature 1..21: note = Synthetic
  source 1..21: mol_type = other RNA
aatatttgccgtgcacgtacg

SEQ ID NO: 19360 - RNA, 22 nt, synthetic construct
  misc_feature 1..22: note = Synthetic
  source 1..22: mol_type = other RNA
aaatatttgccgtgcacgtacg

SEQ ID NO: 19361 - RNA, 23 nt, synthetic construct
  misc_feature 1..23: note = Synthetic
  source 1..23: mol_type = other RNA
aaaatatttgccgtgcacgtacg

SEQ ID NO: 19362 - RNA, 24 nt, synthetic construct
  misc_feature 1..24: note = Synthetic
  source 1..24: mol_type = other RNA
aaaaatatttgccgtgcacgtacg

SEQ ID NO: 19363 - RNA, 18 nt, synthetic construct
  misc_feature 1..18: note = Synthetic
  source 1..18: mol_type = other RNA
cccgccatgcaggccccg

SEQ ID NO: 19364 - RNA, 19 nt, synthetic construct
  misc_feature 1..19: note = Synthetic
  source 1..19: mol_type = other RNA
gcccgccatgcaggccccg

SEQ ID NO: 19365 - RNA, 21 nt, synthetic construct
  misc_feature 1..21: note = Synthetic
  source 1..21: mol_type = other RNA
aggcccgccatgcaggccccg

SEQ ID NO: 19366 - RNA, 22 nt, synthetic construct
  misc_feature 1..22: note = Synthetic
  source 1..22: mol_type = other RNA
caggcccgccatgcaggccccg

SEQ ID NO: 19367 - RNA, 23 nt, synthetic construct
  misc_feature 1..23: note = Synthetic
  source 1..23: mol_type = other RNA
tcaggcccgccatgcaggccccg

SEQ ID NO: 19368 - RNA, 24 nt, synthetic construct
  misc_feature 1..24: note = Synthetic
  source 1..24: mol_type = other RNA
atcaggcccgccatgcaggccccg

SEQ ID NO: 19369 - RNA, 18 nt, synthetic construct
  misc_feature 1..18: note = Synthetic
  source 1..18: mol_type = other RNA
gcgctcggagatggagcg

SEQ ID NO: 19370 - RNA, 19 nt, synthetic construct
  misc_feature 1..19: note = Synthetic
  source 1..19: mol_type = other RNA
cgcgctcggagatggagcg

SEQ ID NO: 19371 - RNA, 20 nt, synthetic construct
  misc_feature 1..20: note = Synthetic
  source 1..20: mol_type = other RNA
gcgcgctcggagatggagcg

SEQ ID NO: 19372 - RNA, 21 nt, synthetic construct
  misc_feature 1..21: note = Synthetic
  source 1..21: mol_type = other RNA
cgcgcgctcggagatggagcg

SEQ ID NO: 19373 - RNA, 22 nt, synthetic construct
  misc_feature 1..22: note = Synthetic
  source 1..22: mol_type = other RNA
ccgcgcgctcggagatggagcg

SEQ ID NO: 19374 - RNA, 23 nt, synthetic construct
  misc_feature 1..23: note = Synthetic
  source 1..23: mol_type = other RNA
gccgcgcgctcggagatggagcg

SEQ ID NO: 19375 - RNA, 24 nt, synthetic construct
  misc_feature 1..24: note = Synthetic
  source 1..24: mol_type = other RNA
cgccgcgcgctcggagatggagcg

SEQ ID NO: 19376 - RNA, 18 nt, synthetic construct
  misc_feature 1..18: note = Synthetic
  source 1..18: mol_type = other RNA
tcgccagcgtcattagcg

SEQ ID NO: 19377 - RNA, 19 nt, synthetic construct
  misc_feature 1..19: note = Synthetic
  source 1..19: mol_type = other RNA
atcgccagcgtcattagcg

SEQ ID NO: 19378 - RNA, 21 nt, synthetic construct
  misc_feature 1..21: note = Synthetic
  source 1..21: mol_type = other RNA
caatcgccagcgtcattagcg

SEQ ID NO: 19379 - RNA, 22 nt, synthetic construct
  misc_feature 1..22: note = Synthetic
  source 1..22: mol_type = other RNA
gcaatcgccagcgtcattagcg

SEQ ID NO: 19380 - RNA, 23 nt, synthetic construct
  misc_feature 1..23: note = Synthetic
  source 1..23: mol_type = other RNA
ggcaatcgccagcgtcattagcg

SEQ ID NO: 19381 - RNA, 24 nt, synthetic construct
  misc_feature 1..24: note = Synthetic
  source 1..24: mol_type = other RNA
gggcaatcgccagcgtcattagcg

SEQ ID NO: 19382 - RNA, 18 nt, synthetic construct
  misc_feature 1..18: note = Synthetic
  source 1..18: mol_type = other RNA
gcccaggggctattcgcg

SEQ ID NO: 19383 - RNA, 19 nt, synthetic construct
  misc_feature 1..19: note = Synthetic
  source 1..19: mol_type = other RNA
ggcccaggggctattcgcg

SEQ ID NO: 19384 - RNA, 20 nt, synthetic construct
  misc_feature 1..20: note = Synthetic
  source 1..20: mol_type = other RNA
gggcccaggggctattcgcg

SEQ ID NO: 19385 - RNA, 21 nt, synthetic construct
  misc_feature 1..21: note = Synthetic
  source 1..21: mol_type = other RNA
ggggcccaggggctattcgcg

SEQ ID NO: 19386 - RNA, 22 nt, synthetic construct
  misc_feature 1..22: note = Synthetic
  source 1..22: mol_type = other RNA
cggggcccaggggctattcgcg

SEQ ID NO: 19387 - RNA, 23 nt, synthetic construct
  misc_feature 1..23: note = Synthetic
  source 1..23: mol_type = other RNA
ccggggcccaggggctattcgcg

SEQ ID NO: 19388 - RNA, 24 nt, synthetic construct
  misc_feature 1..24: note = Synthetic
  source 1..24: mol_type = other RNA
accggggcccaggggctattcgcg

SEQ ID NO: 19389 - RNA, 18 nt, synthetic construct
  misc_feature 1..18: note = Synthetic
  source 1..18: mol_type = other RNA
gcgtcgatggtgtcggcg

SEQ ID NO: 19390 - RNA, 19 nt, synthetic construct
  misc_feature 1..19: note = Synthetic
  source 1..19: mol_type = other RNA
ggcgtcgatggtgtcggcg

SEQ ID NO: 19391 - RNA, 20 nt, synthetic construct
  misc_feature 1..20: note = Synthetic
  source 1..20: mol_type = other RNA
tggcgtcgatggtgtcggcg

SEQ ID NO: 19392 - RNA, 21 nt, synthetic construct
  misc_feature 1..21: note = Synthetic
  source 1..21: mol_type = other RNA
gtggcgtcgatggtgtcggcg

SEQ ID NO: 19393 - RNA, 22 nt, synthetic construct
  misc_feature 1..22: note = Synthetic
  source 1..22: mol_type = other RNA
ggtggcgtcgatggtgtcggcg

SEQ ID NO: 19394 - RNA, 23 nt, synthetic construct
  misc_feature 1..23: note = Synthetic
  source 1..23: mol_type = other RNA
tggtggcgtcgatggtgtcggcg

SEQ ID NO: 19395 - RNA, 24 nt, synthetic construct
  misc_feature 1..24: note = Synthetic
  source 1..24: mol_type = other RNA
gtggtggcgtcgatggtgtcggcg

SEQ ID NO: 19396 - RNA, 18 nt, synthetic construct
  misc_feature 1..18: note = Synthetic
  source 1..18: mol_type = other RNA
cgcgggggtccgcgggcg

SEQ ID NO: 19397 - RNA, 19 nt, synthetic construct
  misc_feature 1..19: note = Synthetic
  source 1..19: mol_type = other RNA
gcgcgggggtccgcgggcg

SEQ ID NO: 19398 - RNA, 21 nt, synthetic construct
  misc_feature 1..21: note = Synthetic
  source 1..21: mol_type = other RNA
gggcgcgggggtccgcgggcg

SEQ ID NO: 19399 - RNA, 22 nt, synthetic construct
  misc_feature 1..22: note = Synthetic
  source 1..22: mol_type = other RNA
ggggcgcgggggtccgcgggcg

SEQ ID NO: 19400 - RNA, 23 nt, synthetic construct
  misc_feature 1..23: note = Synthetic
  source 1..23: mol_type = other RNA
cggggcgcgggggtccgcgggcg

SEQ ID NO: 19401 - RNA, 24 nt, synthetic construct
  misc_feature 1..24: note = Synthetic
  source 1..24: mol_type = other RNA
ccggggcgcgggggtccgcgggcg

SEQ ID NO: 19402 - RNA, 18 nt, synthetic construct
  misc_feature 1..18: note = Synthetic
  source 1..18: mol_type = other RNA
cgctccggggccggggcg

SEQ ID NO: 19403 - RNA, 19 nt, synthetic construct
  misc_feature 1..19: note = Synthetic
  source 1..19: mol_type = other RNA
tcgctccggggccggggcg

SEQ ID NO: 19404 - RNA, 21 nt, synthetic construct
  misc_feature 1..21: note = Synthetic
  source 1..21: mol_type = other RNA
tttcgctccggggccggggcg

SEQ ID NO: 19405 - RNA, 22 nt, synthetic construct
  misc_feature 1..22: note = Synthetic
  source 1..22: mol_type = other RNA
ctttcgctccggggccggggcg

SEQ ID NO: 19406 - RNA, 23 nt, synthetic construct
  misc_feature 1..23: note = Synthetic
  source 1..23: mol_type = other RNA
cctttcgctccggggccggggcg

SEQ ID NO: 19407 - RNA, 24 nt, synthetic construct
  misc_feature 1..24: note = Synthetic
  source 1..24: mol_type = other RNA
gcctttcgctccggggccggggcg

SEQ ID NO: 19408 - RNA, 18 nt, synthetic construct
  misc_feature 1..18: note = Synthetic
  source 1..18: mol_type = other RNA
gcctcgccatggggggcg

SEQ ID NO: 19409 - RNA, 19 nt, synthetic construct
  misc_feature 1..19: note = Synthetic
  source 1..19: mol_type = other RNA
cgcctcgccatggggggcg

SEQ ID NO: 19410 - RNA, 20 nt, synthetic construct
  misc_feature 1..20: note = Synthetic
  source 1..20: mol_type = other RNA
acgcctcgccatggggggcg

SEQ ID NO: 19411 - RNA, 21 nt, synthetic construct
  misc_feature 1..21: note = Synthetic
  source 1..21: mol_type = other RNA
cacgcctcgccatggggggcg

SEQ ID NO: 19412 - RNA, 22 nt, synthetic construct
  misc_feature 1..22: note = Synthetic
  source 1..22: mol_type = other RNA
ccacgcctcgccatggggggcg

SEQ ID NO: 19413 - RNA, 23 nt, synthetic construct
  misc_feature 1..23: note = Synthetic
  source 1..23: mol_type = other RNA
gccacgcctcgccatggggggcg

SEQ ID NO: 19414 - RNA, 24 nt, synthetic construct
  misc_feature 1..24: note = Synthetic
  source 1..24: mol_type = other RNA
cgccacgcctcgccatggggggcg

SEQ ID NO: 19415 - RNA, 18 nt, synthetic construct
  misc_feature 1..18: note = Synthetic
  source 1..18: mol_type = other RNA
gcggaggccagcgcctcg

SEQ ID NO: 19416 - RNA, 19 nt, synthetic construct
  misc_feature 1..19: note = Synthetic
  source 1..19: mol_type = other RNA
ggcggaggccagcgcctcg

SEQ ID NO: 19417 - RNA, 21 nt, synthetic construct
  misc_feature 1..21: note = Synthetic
  source 1..21: mol_type = other RNA
tcggcggaggccagcgcctcg

SEQ ID NO: 19418 - RNA, 22 nt, synthetic construct
  misc_feature 1..22: note = Synthetic
  source 1..22: mol_type = other RNA
gtcggcggaggccagcgcctcg

SEQ ID NO: 19419 - RNA, 23 nt, synthetic construct
  misc_feature 1..23: note = Synthetic
  source 1..23: mol_type = other RNA
cgtcggcggaggccagcgcctcg

SEQ ID NO: 19420 - RNA, 24 nt, synthetic construct
  misc_feature 1..24: note = Synthetic
  source 1..24: mol_type = other RNA
tcgtcggcggaggccagcgcctcg

SEQ ID NO: 19421 - RNA, 18 nt, synthetic construct
  misc_feature 1..18: note = Synthetic
  source 1..18: mol_type = other RNA
cacgccagcgtctcgtcg

SEQ ID NO: 19422 - RNA, 19 nt, synthetic construct
  misc_feature 1..19: note = Synthetic
  source 1..19: mol_type = other RNA
ccacgccagcgtctcgtcg

SEQ ID NO: 19423 - RNA, 20 nt, synthetic construct
  misc_feature 1..20: note = Synthetic
  source 1..20: mol_type = other RNA
accacgccagcgtctcgtcg

SEQ ID NO: 19424 - RNA, 21 nt, synthetic construct
  misc_feature 1..21: note = Synthetic
  source 1..21: mol_type = other RNA
caccacgccagcgtctcgtcg

SEQ ID NO: 19425 - RNA, 22 nt, synthetic construct
  misc_feature 1..22: note = Synthetic
  source 1..22: mol_type = other RNA
gcaccacgccagcgtctcgtcg

SEQ ID NO: 19426 - RNA, 23 nt, synthetic construct
  misc_feature 1..23: note = Synthetic
  source 1..23: mol_type = other RNA
tgcaccacgccagcgtctcgtcg

SEQ ID NO: 19427 - RNA, 24 nt, synthetic construct
  misc_feature 1..24: note = Synthetic
  source 1..24: mol_type = other RNA
ttgcaccacgccagcgtctcgtcg

SEQ ID NO: 19428 - RNA, 18 nt, synthetic construct
  misc_feature 1..18: note = Synthetic
  source 1..18: mol_type = other RNA
atgcaggccccggggagg

SEQ ID NO: 19429 - RNA, 19 nt, synthetic construct
  misc_feature 1..19: note = Synthetic
  source 1..19: mol_type = other RNA
catgcaggccccggggagg

SEQ ID NO: 19430 - RNA, 20 nt, synthetic construct
  misc_feature 1..20: note = Synthetic
  source 1..20: mol_type = other RNA
ccatgcaggccccggggagg

SEQ ID NO: 19431 - RNA, 21 nt, synthetic construct
  misc_feature 1..21: note = Synthetic
  source 1..21: mol_type = other RNA
gccatgcaggccccggggagg

SEQ ID NO: 19432 - RNA, 22 nt, synthetic construct
  misc_feature 1..22: note = Synthetic
  source 1..22: mol_type = other RNA
cgccatgcaggccccggggagg

SEQ ID NO: 19433 - RNA, 23 nt, synthetic construct
  misc_feature 1..23: note = Synthetic
  source 1..23: mol_type = other RNA
ccgccatgcaggccccggggagg

SEQ ID NO: 19434 - RNA, 24 nt, synthetic construct
  misc_feature 1..24: note = Synthetic
  source 1..24: mol_type = other RNA
cccgccatgcaggccccggggagg

SEQ ID NO: 19435 - RNA, 18 nt, synthetic construct
  misc_feature 1..18: note = Synthetic
  source 1..18: mol_type = other RNA
tttgccgtgcacgtacgg

SEQ ID NO: 19436 - RNA, 19 nt, synthetic construct
  misc_feature 1..19: note = Synthetic
  source 1..19: mol_type = other RNA
atttgccgtgcacgtacgg

SEQ ID NO: 19437 - RNA, 21 nt, synthetic construct
  misc_feature 1..21: note = Synthetic
  source 1..21: mol_type = other RNA
atatttgccgtgcacgtacgg

SEQ ID NO: 19438 - RNA, 22 nt, synthetic construct
  misc_feature 1..22: note = Synthetic
  source 1..22: mol_type = other RNA
aatatttgccgtgcacgtacgg

SEQ ID NO: 19439 - RNA, 23 nt, synthetic construct
  misc_feature 1..23: note = Synthetic
  source 1..23: mol_type = other RNA
aaatatttgccgtgcacgtacgg

SEQ ID NO: 19440 - RNA, 24 nt, synthetic construct
  misc_feature 1..24: note = Synthetic
  source 1..24: mol_type = other RNA
aaaatatttgccgtgcacgtacgg

SEQ ID NO: 19441 - RNA, 18 nt, synthetic construct
  misc_feature 1..18: note = Synthetic
  source 1..18: mol_type = other RNA
cgccagcgtcattagcgg

SEQ ID NO: 19442 - RNA, 19 nt, synthetic construct
  misc_feature 1..19: note = Synthetic
  source 1..19: mol_type = other RNA
tcgccagcgtcattagcgg

SEQ ID NO: 19443 - RNA, 21 nt, synthetic construct
  misc_feature 1..21: note = Synthetic
  source 1..21: mol_type = other RNA
aatcgccagcgtcattagcgg

SEQ ID NO: 19444 - RNA, 22 nt, synthetic construct
  misc_feature 1..22: note = Synthetic
  source 1..22: mol_type = other RNA
caatcgccagcgtcattagcgg

SEQ ID NO: 19445 - RNA, 23 nt, synthetic construct
  misc_feature 1..23: note = Synthetic
  source 1..23: mol_type = other RNA
gcaatcgccagcgtcattagcgg

SEQ ID NO: 19446 - RNA, 24 nt, synthetic construct
  misc_feature 1..24: note = Synthetic
  source 1..24: mol_type = other RNA
ggcaatcgccagcgtcattagcgg

SEQ ID NO: 19447 - RNA, 18 nt, synthetic construct
  misc_feature 1..18: note = Synthetic
  source 1..18: mol_type = other RNA
gggcgcgggggtccgcgg

SEQ ID NO: 19448 - RNA, 19 nt, synthetic construct
  misc_feature 1..19: note = Synthetic
  source 1..19: mol_type = other RNA
ggggcgcgggggtccgcgg

SEQ ID NO: 19449 - RNA, 20 nt, synthetic construct
  misc_feature 1..20: note = Synthetic
  source 1..20: mol_type = other RNA
cggggcgcgggggtccgcgg

SEQ ID NO: 19450 - RNA, 21 nt, synthetic construct
  misc_feature 1..21: note = Synthetic
  source 1..21: mol_type = other RNA
ccggggcgcgggggtccgcgg

SEQ ID NO: 19451 - RNA, 22 nt, synthetic construct
  misc_feature 1..22: note = Synthetic
  source 1..22: mol_type = other RNA
gccggggcgcgggggtccgcgg

SEQ ID NO: 19452 - RNA, 23 nt, synthetic construct
  misc_feature 1..23: note = Synthetic
  source 1..23: mol_type = other RNA
ggccggggcgcgggggtccgcgg

SEQ ID NO: 19453 - RNA, 24 nt, synthetic construct
  misc_feature 1..24: note = Synthetic
  source 1..24: mol_type = other RNA
gggccggggcgcgggggtccgcgg

SEQ ID NO: 19454 - RNA, 18 nt, synthetic construct
  misc_feature 1..18: note = Synthetic
  source 1..18: mol_type = other RNA
cccaggggctattcgcgg

SEQ ID NO: 19455 - RNA, 19 nt, synthetic construct
  misc_feature 1..19: note = Synthetic
  source 1..19: mol_type = other RNA
gcccaggggctattcgcgg

SEQ ID NO: 19456 - RNA, 21 nt, synthetic construct
  misc_feature 1..21: note = Synthetic
  source 1..21: mol_type = other RNA
gggcccaggggctattcgcgg

SEQ ID NO: 19457 - RNA, 22 nt, synthetic construct
  misc_feature 1..22: note = Synthetic
  source 1..22: mol_type = other RNA
ggggcccaggggctattcgcgg

SEQ ID NO: 19458 - RNA, 23 nt, synthetic construct
  misc_feature 1..23: note = Synthetic
  source 1..23: mol_type = other RNA
cggggcccaggggctattcgcgg

SEQ ID NO: 19459 - RNA, 24 nt, synthetic construct
  misc_feature 1..24: note = Synthetic
  source 1..24: mol_type = other RNA
ccggggcccaggggctattcgcgg

SEQ ID NO: 19460 - RNA, 18 nt, synthetic construct
  misc_feature 1..18: note = Synthetic
  source 1..18: mol_type = other RNA
gcgggggtccgcgggcgg

SEQ ID NO: 19461 - RNA, 19 nt, synthetic construct
  misc_feature 1..19: note = Synthetic
  source 1..19: mol_type = other RNA
cgcgggggtccgcgggcgg

SEQ ID NO: 19462 - RNA, 21 nt, synthetic construct
  misc_feature 1..21: note = Synthetic
  source 1..21: mol_type = other RNA
ggcgcgggggtccgcgggcgg

SEQ ID NO: 19463 - RNA, 22 nt, synthetic construct
  misc_feature 1..22: note = Synthetic
  source 1..22: mol_type = other RNA
gggcgcgggggtccgcgggcgg

SEQ ID NO: 19464 - RNA, 23 nt, synthetic construct
  misc_feature 1..23: note = Synthetic
  source 1..23: mol_type = other RNA
ggggcgcgggggtccgcgggcgg

SEQ ID NO: 19465 - RNA, 24 nt, synthetic construct
  misc_feature 1..24: note = Synthetic
  source 1..24: mol_type = other RNA
cggggcgcgggggtccgcgggcgg

SEQ ID NO: 19466 - RNA, 18 nt, synthetic construct
  misc_feature 1..18: note = Synthetic
  source 1..18: mol_type = other RNA
acgccagcgtctcgtcgg

SEQ ID NO: 19467 - RNA, 19 nt, synthetic construct
  misc_feature 1..19: note = Synthetic
  source 1..19: mol_type = other RNA
cacgccagcgtctcgtcgg

SEQ ID NO: 19468 - RNA, 21 nt, synthetic construct
  misc_feature 1..21: note = Synthetic
  source 1..21: mol_type = other RNA
accacgccagcgtctcgtcgg

SEQ ID NO: 19469 - RNA, 22 nt, synthetic construct
  misc_feature 1..22: note = Synthetic
  source 1..22: mol_type = other RNA
caccacgccagcgtctcgtcgg

SEQ ID NO: 19470 - RNA, 23 nt, synthetic construct
  misc_feature 1..23: note = Synthetic
  source 1..23: mol_type = other RNA
gcaccacgccagcgtctcgtcgg

SEQ ID NO: 19471 - RNA, 24 nt, synthetic construct
  misc_feature 1..24: note = Synthetic
  source 1..24: mol_type = other RNA
tgcaccacgccagcgtctcgtcgg

SEQ ID NO: 19472 - RNA, 18 nt, synthetic construct
  misc_feature 1..18: note = Synthetic
  source 1..18: mol_type = other RNA
cgtccaccccgccccggg

SEQ ID NO: 19473 - RNA, 19 nt, synthetic construct
  misc_feature 1..19: note = Synthetic
  source 1..19: mol_type = other RNA
ccgtccaccccgccccggg

SEQ ID NO: 19474 - RNA, 20 nt, synthetic construct
  misc_feature 1..20: note = Synthetic
  source 1..20: mol_type = other RNA
tccgtccaccccgccccggg

SEQ ID NO: 19475 - RNA, 21 nt, synthetic construct
  misc_feature 1..21: note = Synthetic
  source 1..21: mol_type = other RNA
gtccgtccaccccgccccggg

SEQ ID NO: 19476 - RNA, 22 nt, synthetic construct
  misc_feature 1..22: note = Synthetic
  source 1..22: mol_type = other RNA
cgtccgtccaccccgccccggg

SEQ ID NO: 19477 - RNA, 23 nt, synthetic construct
  misc_feature 1..23: note = Synthetic
  source 1..23: mol_type = other RNA
ccgtccgtccaccccgccccggg

SEQ ID NO: 19478 - RNA, 24 nt, synthetic construct
  misc_feature 1..24: note = Synthetic
  source 1..24: mol_type = other RNA
gccgtccgtccaccccgccccggg

SEQ ID NO: 19479 - RNA, 18 nt, synthetic construct
  misc_feature 1..18: note = Synthetic
  source 1..18: mol_type = other RNA
ggcgcgggggtccgcggg

SEQ ID NO: 19480 - RNA, 19 nt, synthetic construct
  misc_feature 1..19: note = Synthetic
  source 1..19: mol_type = other RNA
gggcgcgggggtccgcggg

SEQ ID NO: 19481 - RNA, 21 nt, synthetic construct
  misc_feature 1..21: note = Synthetic
  source 1..21: mol_type = other RNA
cggggcgcgggggtccgcggg

SEQ ID NO: 19482 - RNA, 22 nt, synthetic construct
  misc_feature 1..22: note = Synthetic
  source 1..22: mol_type = other RNA
ccggggcgcgggggtccgcggg

SEQ ID NO: 19483 - RNA, 23 nt, synthetic construct
  misc_feature 1..23: note = Synthetic
  source 1..23: mol_type = other RNA
gccggggcgcgggggtccgcggg

SEQ ID NO: 19484 - RNA, 24 nt, synthetic construct
  misc_feature 1..24: note = Synthetic
  source 1..24: mol_type = other RNA
ggccggggcgcgggggtccgcggg

SEQ ID NO: 19485 - RNA, 18 nt, synthetic construct
  misc_feature 1..18: note = Synthetic
  source 1..18: mol_type = other RNA
gcgcctttcgctccgggg

SEQ ID NO: 19486 - RNA, 19 nt, synthetic construct
  misc_feature 1..19: note = Synthetic
  source 1..19: mol_type = other RNA
ggcgcctttcgctccgggg

SEQ ID NO: 19487 - RNA, 20 nt, synthetic construct
  misc_feature 1..20: note = Synthetic
  source 1..20: mol_type = other RNA
gggcgcctttcgctccgggg

SEQ ID NO: 19488 - RNA, 21 nt, synthetic construct
  misc_feature 1..21: note = Synthetic
  source 1..21: mol_type = other RNA
cgggcgcctttcgctccgggg

SEQ ID NO: 19489 - RNA, 22 nt, synthetic construct
  misc_feature 1..22: note = Synthetic
  source 1..22: mol_type = other RNA
gcgggcgcctttcgctccgggg

SEQ ID NO: 19490 - RNA, 23 nt, synthetic construct
  misc_feature 1..23: note = Synthetic
  source 1..23: mol_type = other RNA
ggcgggcgcctttcgctccgggg

SEQ ID NO: 19491 - RNA, 24 nt, synthetic construct
  misc_feature 1..24: note = Synthetic
  source 1..24: mol_type = other RNA
cggcgggcgcctttcgctccgggg

SEQ ID NO: 19492 - RNA, 18 nt, synthetic construct
  misc_feature 1..18: note = Synthetic
  source 1..18: mol_type = other RNA
cgctggcctccgggtggg

SEQ ID NO: 19493 - RNA, 19 nt, synthetic construct
  misc_feature 1..19: note = Synthetic
  source 1..19: mol_type = other RNA
ccgctggcctccgggtggg

SEQ ID NO: 19494 - RNA, 20 nt, synthetic construct
  misc_feature 1..20: note = Synthetic
  source 1..20: mol_type = other RNA
tccgctggcctccgggtggg

SEQ ID NO: 19495 - RNA, 21 nt, synthetic construct
  misc_feature 1..21: note = Synthetic
  source 1..21: mol_type = other RNA
gtccgctggcctccgggtggg

SEQ ID NO: 19496 - RNA, 22 nt, synthetic construct
  misc_feature 1..22: note = Synthetic
  source 1..22: mol_type = other RNA
tgtccgctggcctccgggtggg

SEQ ID NO: 19497 - RNA, 23 nt, synthetic construct
  misc_feature 1..23: note = Synthetic
  source 1..23: mol_type = other RNA
gtgtccgctggcctccgggtggg

SEQ ID NO: 19498 - RNA, 24 nt, synthetic construct
  misc_feature 1..24: note = Synthetic
  source 1..24: mol_type = other RNA
cgtgtccgctggcctccgggtggg

SEQ ID NO: 19499 - RNA, 18 nt, synthetic construct
  misc_feature 1..18: note = Synthetic
  source 1..18: mol_type = other RNA
gcgccacgcctcgccatg

SEQ ID NO: 19500 - RNA, 19 nt, synthetic construct
  misc_feature 1..19: note = Synthetic
  source 1..19: mol_type = other RNA
cgcgccacgcctcgccatg

SEQ ID NO: 19501 - RNA, 21 nt, synthetic construct
  misc_feature 1..21: note = Synthetic
  source 1..21: mol_type = other RNA
gccgcgccacgcctcgccatg

SEQ ID NO: 19502 - RNA, 22 nt, synthetic construct
  misc_feature 1..22: note = Synthetic
  source 1..22: mol_type = other RNA
tgccgcgccacgcctcgccatg

SEQ ID NO: 19503 - RNA, 23 nt, synthetic construct
  misc_feature 1..23: note = Synthetic
  source 1..23: mol_type = other RNA
ctgccgcgccacgcctcgccatg

SEQ ID NO: 19504 - RNA, 24 nt, synthetic construct
  misc_feature 1..24: note = Synthetic
  source 1..24: mol_type = other RNA
actgccgcgccacgcctcgccatg

SEQ ID NO: 19505 - RNA, 18 nt, synthetic construct
  misc_feature 1..18: note = Synthetic
  source 1..18: mol_type = other RNA
cgccttcaggtagcactg

SEQ ID NO: 19506 - RNA, 19 nt, synthetic construct
  misc_feature 1..19: note = Synthetic
  source 1..19: mol_type = other RNA
gcgccttcaggtagcactg

SEQ ID NO: 19507 - RNA, 20 nt, synthetic construct
  misc_feature 1..20: note = Synthetic
  source 1..20: mol_type = other RNA
cgcgccttcaggtagcactg

SEQ ID NO: 19508 - RNA, 21 nt, synthetic construct
  misc_feature 1..21: note = Synthetic
  source 1..21: mol_type = other RNA
tcgcgccttcaggtagcactg

SEQ ID NO: 19509 - RNA, 22 nt, synthetic construct
  misc_feature 1..22: note = Synthetic
  source 1..22: mol_type = other RNA
ctcgcgccttcaggtagcactg

SEQ ID NO: 19510 - RNA, 23 nt, synthetic construct
  misc_feature 1..23: note = Synthetic
  source 1..23: mol_type = other RNA
cctcgcgccttcaggtagcactg

SEQ ID NO: 19511 - RNA, 24 nt, synthetic construct
  misc_feature 1..24: note = Synthetic
  source 1..24: mol_type = other RNA
gcctcgcgccttcaggtagcactg

SEQ ID NO: 19512 - RNA, 18 nt, synthetic construct
  misc_feature 1..18: note = Synthetic
  source 1..18: mol_type = other RNA
aagggccgcaggcgcgtg

SEQ ID NO: 19513 - RNA, 19 nt, synthetic construct
  misc_feature 1..19: note = Synthetic
  source 1..19: mol_type = other RNA
aaagggccgcaggcgcgtg

SEQ ID NO: 19514 - RNA, 20 nt, synthetic construct
  misc_feature 1..20: note = Synthetic
  source 1..20: mol_type = other RNA
gaaagggccgcaggcgcgtg

SEQ ID NO: 19515 - RNA, 21 nt, synthetic construct
  misc_feature 1..21: note = Synthetic
  source 1..21: mol_type = other RNA
agaaagggccgcaggcgcgtg

SEQ ID NO: 19516 - RNA, 22 nt, synthetic construct
  misc_feature 1..22: note = Synthetic
  source 1..22: mol_type = other RNA
gagaaagggccgcaggcgcgtg

SEQ ID NO: 19517 - RNA, 23 nt, synthetic construct
  misc_feature 1..23: note = Synthetic
  source 1..23: mol_type = other RNA
ggagaaagggccgcaggcgcgtg

SEQ ID NO: 19518 - RNA, 24 nt, synthetic construct
  misc_feature 1..24: note = Synthetic
  source 1..24: mol_type = other RNA
tggagaaagggccgcaggcgcgtg

SEQ ID NO: 19519 - RNA, 18 nt, synthetic construct
  misc_feature 1..18: note = Synthetic
  source 1..18: mol_type = other RNA
ccacgctcgacgcggttg

SEQ ID NO: 19520 - RNA, 19 nt, synthetic construct
  misc_feature 1..19: note = Synthetic
  source 1..19: mol_type = other RNA
gccacgctcgacgcggttg

SEQ ID NO: 19521 - RNA, 20 nt, synthetic construct
  misc_feature 1..20: note = Synthetic
  source 1..20: mol_type = other RNA
cgccacgctcgacgcggttg

SEQ ID NO: 19522 - RNA, 21 nt, synthetic construct
  misc_feature 1..21: note = Synthetic
  source 1..21: mol_type = other RNA
acgccacgctcgacgcggttg

SEQ ID NO: 19523 - RNA, 22 nt, synthetic construct
  misc_feature 1..22: note = Synthetic
  source 1..22: mol_type = other RNA
gacgccacgctcgacgcggttg

SEQ ID NO: 19524 - RNA, 23 nt, synthetic construct
  misc_feature 1..23: note = Synthetic
  source 1..23: mol_type = other RNA
cgacgccacgctcgacgcggttg

SEQ ID NO: 19525 - RNA, 24 nt, synthetic construct
  misc_feature 1..24: note = Synthetic
  source 1..24: mol_type = other RNA
gcgacgccacgctcgacgcggttg

SEQ ID NO: 19526 - RNA, 18 nt, synthetic construct
  misc_feature 1..18: note = Synthetic
  source 1..18: mol_type = other RNA
cgcgccacgcctcgccat

SEQ ID NO: 19527 - RNA, 19 nt, synthetic construct
  misc_feature 1..19: note = Synthetic
  source 1..19: mol_type = other RNA
ccgcgccacgcctcgccat

SEQ ID NO: 19528 - RNA, 21 nt, synthetic construct
  misc_feature 1..21: note = Synthetic
  source 1..21: mol_type = other RNA
tgccgcgccacgcctcgccat

SEQ ID NO: 19529 - RNA, 22 nt, synthetic construct
  misc_feature 1..22: note = Synthetic
  source 1..22: mol_type = other RNA
ctgccgcgccacgcctcgccat

SEQ ID NO: 19530 - RNA, 23 nt, synthetic construct
  misc_feature 1..23: note = Synthetic
  source 1..23: mol_type = other RNA
actgccgcgccacgcctcgccat

SEQ ID NO: 19531 - RNA, 24 nt, synthetic construct
  misc_feature 1..24: note = Synthetic
  source 1..24: mol_type = other RNA
cactgccgcgccacgcctcgccat

SEQ ID NO: 19532 - RNA, 18 nt, synthetic construct
  misc_feature 1..18: note = Synthetic
  source 1..18: mol_type = other RNA
tcccgataatggggtcct

SEQ ID NO: 19533 - RNA, 19 nt, synthetic construct
  misc_feature 1..19: note = Synthetic
  source 1..19: mol_type = other RNA
gtcccgataatggggtcct

SEQ ID NO: 19534 - RNA, 21 nt, synthetic construct
  misc_feature 1..21: note = Synthetic
  source 1..21: mol_type = other RNA
tcgtcccgataatggggtcct

SEQ ID NO: 19535 - RNA, 22 nt, synthetic construct
  misc_feature 1..22: note = Synthetic
  source 1..22: mol_type = other RNA
gtcgtcccgataatggggtcct

SEQ ID NO: 19536 - RNA, 23 nt, synthetic construct
  misc_feature 1..23: note = Synthetic
  source 1..23: mol_type = other RNA
ggtcgtcccgataatggggtcct

SEQ ID NO: 19537 - RNA, 24 nt, synthetic construct
  misc_feature 1..24: note = Synthetic
  source 1..24: mol_type = other RNA
cggtcgtcccgataatggggtcct

SEQ ID NO: 19538 - RNA, 18 nt, synthetic construct
  misc_feature 1..18: note = Synthetic
  source 1..18: mol_type = other RNA
ggtcgaccgccgcgcgct

SEQ ID NO: 19539 - RNA, 19 nt, synthetic construct
  misc_feature 1..19: note = Synthetic
  source 1..19: mol_type = other RNA
cggtcgaccgccgcgcgct

SEQ ID NO: 19540 - RNA, 21 nt, synthetic construct
  misc_feature 1..21: note = Synthetic
  source 1..21: mol_type = other RNA
tgcggtcgaccgccgcgcgct

SEQ ID NO: 19541 - RNA, 22 nt, synthetic construct
  misc_feature 1..22: note = Synthetic
  source 1..22: mol_type = other RNA
atgcggtcgaccgccgcgcgct

SEQ ID NO: 19542 - RNA, 23 nt, synthetic construct
  misc_feature 1..23: note = Synthetic
  source 1..23: mol_type = other RNA
gatgcggtcgaccgccgcgcgct

SEQ ID NO: 19543 - RNA, 24 nt, synthetic construct
  misc_feature 1..24: note = Synthetic
  source 1..24: mol_type = other RNA
tgatgcggtcgaccgccgcgcgct

SEQ ID NO: 19544 - RNA, 18 nt, synthetic construct
  misc_feature 1..18: note = Synthetic
  source 1..18: mol_type = other RNA
cggcgggcgcctttcgct

SEQ ID NO: 19545 - RNA, 19 nt, synthetic construct
  misc_feature 1..19: note = Synthetic
  source 1..19: mol_type = other RNA
gcggcgggcgcctttcgct

SEQ ID NO: 19546 - RNA, 20 nt, synthetic construct
  misc_feature 1..20: note = Synthetic
  source 1..20: mol_type = other RNA
ggcggcgggcgcctttcgct

SEQ ID NO: 19547 - RNA, 21 nt, synthetic construct
  misc_feature 1..21: note = Synthetic
  source 1..21: mol_type = other RNA
cggcggcgggcgcctttcgct

SEQ ID NO: 19548 - RNA, 22 nt, synthetic construct
  misc_feature 1..22: note = Synthetic
  source 1..22: mol_type = other RNA
tcggcggcgggcgcctttcgct

SEQ ID NO: 19549 - RNA, 23 nt, synthetic construct
  misc_feature 1..23: note = Synthetic
  source 1..23: mol_type = other RNA
gtcggcggcgggcgcctttcgct

SEQ ID NO: 19550 - RNA, 24 nt, synthetic construct
  misc_feature 1..24: note = Synthetic
  source 1..24: mol_type = other RNA
tgtcggcggcgggcgcctttcgct

SEQ ID NO: 19551 - RNA, 18 nt, synthetic construct
  misc_feature 1..18: note = Synthetic
  source 1..18: mol_type = other RNA
aatatttgccgtgcacgt

SEQ ID NO: 19552 - RNA, 19 nt, synthetic construct
  misc_feature 1..19: note = Synthetic
  source 1..19: mol_type = other RNA
aaatatttgccgtgcacgt

SEQ ID NO: 19553 - RNA, 20 nt, synthetic construct
  misc_feature 1..20: note = Synthetic
  source 1..20: mol_type = other RNA
aaaatatttgccgtgcacgt

SEQ ID NO: 19554 - RNA, 21 nt, synthetic construct
  misc_feature 1..21: note = Synthetic
  source 1..21: mol_type = other RNA
aaaaatatttgccgtgcacgt

SEQ ID NO: 19555 - RNA, 22 nt, synthetic construct
  misc_feature 1..22: note = Synthetic
  source 1..22: mol_type = other RNA
taaaaatatttgccgtgcacgt

SEQ ID NO: 19556 - RNA, 23 nt, synthetic construct
  misc_feature 1..23: note = Synthetic
  source 1..23: mol_type = other RNA
ataaaaatatttgccgtgcacgt

SEQ ID NO: 19557 - RNA, 24 nt, synthetic construct
  misc_feature 1..24: note = Synthetic
  source 1..24: mol_type = other RNA
aataaaaatatttgccgtgcacgt

SEQ ID NO: 19558 - RNA, 18 nt, synthetic construct
  misc_feature 1..18: note = Synthetic
  source 1..18: mol_type = other RNA
cccggaggccagcggaca

SEQ ID NO: 19559 - RNA, 19 nt, synthetic construct
  misc_feature 1..19: note = Synthetic
  source 1..19: mol_type = other RNA
acccggaggccagcggaca

SEQ ID NO: 19560 - RNA, 21 nt, synthetic construct
  misc_feature 1..21: note = Synthetic
  source 1..21: mol_type = other RNA
ccacccggaggccagcggaca

SEQ ID NO: 19561 - RNA, 22 nt, synthetic construct
  misc_feature 1..22: note = Synthetic
  source 1..22: mol_type = other RNA
cccacccggaggccagcggaca

SEQ ID NO: 19562 - RNA, 23 nt, synthetic construct
  misc_feature 1..23: note = Synthetic
  source 1..23: mol_type = other RNA
acccacccggaggccagcggaca

SEQ ID NO: 19563 - RNA, 24 nt, synthetic construct
  misc_feature 1..24: note = Synthetic
  source 1..24: mol_type = other RNA
gacccacccggaggccagcggaca

SEQ ID NO: 19564 - RNA, 18 nt, synthetic construct
  misc_feature 1..18: note = Synthetic
  source 1..18: mol_type = other RNA
cgacccacccggaggcca

SEQ ID NO: 19565 - RNA, 19 nt, synthetic construct
  misc_feature 1..19: note = Synthetic
  source 1..19: mol_type = other RNA
ccgacccacccggaggcca

SEQ ID NO: 19566 - RNA, 21 nt, synthetic construct
  misc_feature 1..21: note = Synthetic
  source 1..21: mol_type = other RNA
gcccgacccacccggaggcca

SEQ ID NO: 19567 - RNA, 22 nt, synthetic construct
  misc_feature 1..22: note = Synthetic
  source 1..22: mol_type = other RNA
agcccgacccacccggaggcca

SEQ ID NO: 19568 - RNA, 23 nt, synthetic construct
  misc_feature 1..23: note = Synthetic
  source 1..23: mol_type = other RNA
cagcccgacccacccggaggcca

SEQ ID NO: 19569 - RNA, 24 nt, synthetic construct
  misc_feature 1..24: note = Synthetic
  source 1..24: mol_type = other RNA
gcagcccgacccacccggaggcca

SEQ ID NO: 19570 - RNA, 18 nt, synthetic construct
  misc_feature 1..18: note = Synthetic
  source 1..18: mol_type = other RNA
cccggtgctggcgggcca

SEQ ID NO: 19571 - RNA, 19 nt, synthetic construct
  misc_feature 1..19: note = Synthetic
  source 1..19: mol_type = other RNA
ccccggtgctggcgggcca

SEQ ID NO: 19572 - RNA, 21 nt, synthetic construct
  misc_feature 1..21: note = Synthetic
  source 1..21: mol_type = other RNA
ggccccggtgctggcgggcca

SEQ ID NO: 19573 - RNA, 22 nt, synthetic construct
  misc_feature 1..22: note = Synthetic
  source 1..22: mol_type = other RNA
gggccccggtgctggcgggcca

SEQ ID NO: 19574 - RNA, 23 nt, synthetic construct
  misc_feature 1..23: note = Synthetic
  source 1..23: mol_type = other RNA
tgggccccggtgctggcgggcca

SEQ ID NO: 19575 - RNA, 24 nt, synthetic construct
  misc_feature 1..24: note = Synthetic
  source 1..24: mol_type = other RNA
ctgggccccggtgctggcgggcca

SEQ ID NO: 19576 - RNA, 18 nt, synthetic construct
  misc_feature 1..18: note = Synthetic
  source 1..18: mol_type = other RNA
gcgaggcgtggcgcggca

SEQ ID NO: 19577 - RNA, 19 nt, synthetic construct
  misc_feature 1..19: note = Synthetic
  source 1..19: mol_type = other RNA
ggcgaggcgtggcgcggca

SEQ ID NO: 19578 - RNA, 21 nt, synthetic construct
  misc_feature 1..21: note = Synthetic
  source 1..21: mol_type = other RNA
atggcgaggcgtggcgcggca

SEQ ID NO: 19579 - RNA, 22 nt, synthetic construct
  misc_feature 1..22: note = Synthetic
  source 1..22: mol_type = other RNA
catggcgaggcgtggcgcggca

SEQ ID NO: 19580 - RNA, 23 nt, synthetic construct
  misc_feature 1..23: note = Synthetic
  source 1..23: mol_type = other RNA
ccatggcgaggcgtggcgcggca

SEQ ID NO: 19581 - RNA, 24 nt, synthetic construct
  misc_feature 1..24: note = Synthetic
  source 1..24: mol_type = other RNA
cccatggcgaggcgtggcgcggca

SEQ ID NO: 19582 - RNA, 18 nt, synthetic construct
  misc_feature 1..18: note = Synthetic
  source 1..18: mol_type = other RNA
cggcggtcgaccgcatca

SEQ ID NO: 19583 - RNA, 19 nt, synthetic construct
  misc_feature 1..19: note = Synthetic
  source 1..19: mol_type = other RNA
gcggcggtcgaccgcatca

SEQ ID NO: 19584 - RNA, 21 nt, synthetic construct
  misc_feature 1..21: note = Synthetic
  source 1..21: mol_type = other RNA
gcgcggcggtcgaccgcatca

SEQ ID NO: 19585 - RNA, 22 nt, synthetic construct
  misc_feature 1..22: note = Synthetic
  source 1..22: mol_type = other RNA
cgcgcggcggtcgaccgcatca

SEQ ID NO: 19586 - RNA, 23 nt, synthetic construct
  misc_feature 1..23: note = Synthetic
  source 1..23: mol_type = other RNA
gcgcgcggcggtcgaccgcatca

SEQ ID NO: 19587 - RNA, 24 nt, synthetic construct
  misc_feature 1..24: note = Synthetic
  source 1..24: mol_type = other RNA
agcgcgcggcggtcgaccgcatca

SEQ ID NO: 19588 - RNA, 18 nt, synthetic construct
  misc_feature 1..18: note = Synthetic
  source 1..18: mol_type = other RNA
tgcgccaagaaaatttca

SEQ ID NO: 19589 - RNA, 19 nt, synthetic construct
  misc_feature 1..19: note = Synthetic
  source 1..19: mol_type = other RNA
ctgcgccaagaaaatttca

SEQ ID NO: 19590 - RNA, 21 nt, synthetic construct
  misc_feature 1..21: note = Synthetic
  source 1..21: mol_type = other RNA
tgctgcgccaagaaaatttca

SEQ ID NO: 19591 - RNA, 22 nt, synthetic construct
  misc_feature 1..22: note = Synthetic
  source 1..22: mol_type = other RNA
gtgctgcgccaagaaaatttca

SEQ ID NO: 19592 - RNA, 23 nt, synthetic construct
  misc_feature 1..23: note = Synthetic
  source 1..23: mol_type = other RNA
cgtgctgcgccaagaaaatttca

SEQ ID NO: 19593 - RNA, 24 nt, synthetic construct
  misc_feature 1..24: note = Synthetic
  source 1..24: mol_type = other RNA
gcgtgctgcgccaagaaaatttca

SEQ ID NO: 19594 - RNA, 18 nt, synthetic construct
  misc_feature 1..18: note = Synthetic
  source 1..18: mol_type = other RNA
ccgcgccccggccccgga

SEQ ID NO: 19595 - RNA, 19 nt, synthetic construct
  misc_feature 1..19: note = Synthetic
  source 1..19: mol_type = other RNA
cccgcgccccggccccgga

SEQ ID NO: 19596 - RNA, 21 nt, synthetic construct
  misc_feature 1..21: note = Synthetic
  source 1..21: mol_type = other RNA
cccccgcgccccggccccgga

SEQ ID NO: 19597 - RNA, 22 nt, synthetic construct
  misc_feature 1..22: note = Synthetic
  source 1..22: mol_type = other RNA
acccccgcgccccggccccgga

SEQ ID NO: 19598 - RNA, 23 nt, synthetic construct
  misc_feature 1..23: note = Synthetic
  source 1..23: mol_type = other RNA
gacccccgcgccccggccccgga

SEQ ID NO: 19599 - RNA, 24 nt, synthetic construct
  misc_feature 1..24: note = Synthetic
  source 1..24: mol_type = other RNA
ggacccccgcgccccggccccgga

SEQ ID NO: 19600 - RNA, 18 nt, synthetic construct
  misc_feature 1..18: note = Synthetic
  source 1..18: mol_type = other RNA
cttggtgtcggggtcgga

SEQ ID NO: 19601 - RNA, 19 nt, synthetic construct
  misc_feature 1..19: note = Synthetic
  source 1..19: mol_type = other RNA
ccttggtgtcggggtcgga

SEQ ID NO: 19602 - RNA, 21 nt, synthetic construct
  misc_feature 1..21: note = Synthetic
  source 1..21: mol_type = other RNA
acccttggtgtcggggtcgga

SEQ ID NO: 19603 - RNA, 22 nt, synthetic construct
  misc_feature 1..22: note = Synthetic
  source 1..22: mol_type = other RNA
gacccttggtgtcggggtcgga

SEQ ID NO: 19604 - RNA, 23 nt, synthetic construct
  misc_feature 1..23: note = Synthetic
  source 1..23: mol_type = other RNA
cgacccttggtgtcggggtcgga

SEQ ID NO: 19605 - RNA, 24 nt, synthetic construct
  misc_feature 1..24: note = Synthetic
  source 1..24: mol_type = other RNA
gcgacccttggtgtcggggtcgga

SEQ ID NO: 19606 - RNA, 18 nt, synthetic construct
  misc_feature 1..18: note = Synthetic
  source 1..18: mol_type = other RNA
cctgcatggcgggcctga

SEQ ID NO: 19607 - RNA, 19 nt, synthetic construct
  misc_feature 1..19: note = Synthetic
  source 1..19: mol_type = other RNA
gcctgcatggcgggcctga

SEQ ID NO: 19608 - RNA, 21 nt, synthetic construct
  misc_feature 1..21: note = Synthetic
  source 1..21: mol_type = other RNA
gggcctgcatggcgggcctga

SEQ ID NO: 19609 - RNA, 22 nt, synthetic construct
  misc_feature 1..22: note = Synthetic
  source 1..22: mol_type = other RNA
ggggcctgcatggcgggcctga

SEQ ID NO: 19610 - RNA, 23 nt, synthetic construct
  misc_feature 1..23: note = Synthetic
  source 1..23: mol_type = other RNA
cggggcctgcatggcgggcctga

SEQ ID NO: 19611 - RNA, 24 nt, synthetic construct
  misc_feature 1..24: note = Synthetic
  source 1..24: mol_type = other RNA
ccggggcctgcatggcgggcctga

SEQ ID NO: 19612 - RNA, 18 nt, synthetic construct
  misc_feature 1..18: note = Synthetic
  source 1..18: mol_type = other RNA
gcccccaggaccccatta

SEQ ID NO: 19613 - RNA, 19 nt, synthetic construct
  misc_feature 1..19: note = Synthetic
  source 1..19: mol_type = other RNA
cgcccccaggaccccatta

SEQ ID NO: 19614 - RNA, 21 nt, synthetic construct
  misc_feature 1..21: note = Synthetic
  source 1..21: mol_type = other RNA
tgcgcccccaggaccccatta

SEQ ID NO: 19615 - RNA, 22 nt, synthetic construct
  misc_feature 1..22: note = Synthetic
  source 1..22: mol_type = other RNA
ctgcgcccccaggaccccatta

SEQ ID NO: 19616 - RNA, 23 nt, synthetic construct
  misc_feature 1..23: note = Synthetic
  source 1..23: mol_type = other RNA
gctgcgcccccaggaccccatta

SEQ ID NO: 19617 - RNA, 24 nt, synthetic construct
  misc_feature 1..24: note = Synthetic
  source 1..24: mol_type = other RNA
cgctgcgcccccaggaccccatta

SEQ ID NO: 19618 - RNA, 18 nt, synthetic construct
  misc_feature 1..18: note = Synthetic
  source 1..18: mol_type = other RNA
gtgagcagcccgacccac

SEQ ID NO: 19619 - RNA, 19 nt, synthetic construct
  misc_feature 1..19: note = Synthetic
  source 1..19: mol_type = other RNA
agtgagcagcccgacccac

SEQ ID NO: 19620 - RNA, 21 nt, synthetic construct
  misc_feature 1..21: note = Synthetic
  source 1..21: mol_type = other RNA
gcagtgagcagcccgacccac

SEQ ID NO: 19621 - RNA, 22 nt, synthetic construct
  misc_feature 1..22: note = Synthetic
  source 1..22: mol_type = other RNA
ggcagtgagcagcccgacccac

SEQ ID NO: 19622 - RNA, 23 nt, synthetic construct
  misc_feature 1..23: note = Synthetic
  source 1..23: mol_type = other RNA
cggcagtgagcagcccgacccac

SEQ ID NO: 19623 - RNA, 24 nt, synthetic construct
  misc_feature 1..24: note = Synthetic
  source 1..24: mol_type = other RNA
gcggcagtgagcagcccgacccac

SEQ ID NO: 19624 - RNA, 18 nt, synthetic construct
  misc_feature 1..18: note = Synthetic
  source 1..18: mol_type = other RNA
acccggaggccagcggac

SEQ ID NO: 19625 - RNA, 19 nt, synthetic construct
  misc_feature 1..19: note = Synthetic
  source 1..19: mol_type = other RNA
cacccggaggccagcggac

SEQ ID NO: 19626 - RNA, 21 nt, synthetic construct
  misc_feature 1..21: note = Synthetic
  source 1..21: mol_type = other RNA
cccacccggaggccagcggac

SEQ ID NO: 19627 - RNA, 22 nt, synthetic construct
  misc_feature 1..22: note = Synthetic
  source 1..22: mol_type = other RNA
acccacccggaggccagcggac

SEQ ID NO: 19628 - RNA, 23 nt, synthetic construct
  misc_feature 1..23: note = Synthetic
  source 1..23: mol_type = other RNA
gacccacccggaggccagcggac

SEQ ID NO: 19629 - RNA, 24 nt, synthetic construct
  misc_feature 1..24: note = Synthetic
  source 1..24: mol_type = other RNA
cgacccacccggaggccagcggac

SEQ ID NO: 19630 - RNA, 18 nt, synthetic construct
  misc_feature 1..18: note = Synthetic
  source 1..18: mol_type = other RNA
ccctttctccagtgctac

SEQ ID NO: 19631 - RNA, 19 nt, synthetic construct
  misc_feature 1..19: note = Synthetic
  source 1..19: mol_type = other RNA
gccctttctccagtgctac

SEQ ID NO: 19632 - RNA, 21 nt, synthetic construct
  misc_feature 1..21: note = Synthetic
  source 1..21: mol_type = other RNA
cggccctttctccagtgctac

SEQ ID NO: 19633 - RNA, 22 nt, synthetic construct
  misc_feature 1..22: note = Synthetic
  source 1..22: mol_type = other RNA
gcggccctttctccagtgctac

SEQ ID NO: 19634 - RNA, 23 nt, synthetic construct
  misc_feature 1..23: note = Synthetic
  source 1..23: mol_type = other RNA
tgcggccctttctccagtgctac

SEQ ID NO: 19635 - RNA, 24 nt, synthetic construct
  misc_feature 1..24: note = Synthetic
  source 1..24: mol_type = other RNA
ctgcggccctttctccagtgctac

SEQ ID NO: 19636 - RNA, 18 nt, synthetic construct
  misc_feature 1..18: note = Synthetic
  source 1..18: mol_type = other RNA
tgagcagcccgacccacc

SEQ ID NO: 19637 - RNA, 19 nt, synthetic construct
  misc_feature 1..19: note = Synthetic
  source 1..19: mol_type = other RNA
gtgagcagcccgacccacc

SEQ ID NO: 19638 - RNA, 21 nt, synthetic construct
  misc_feature 1..21: note = Synthetic
  source 1..21: mol_type = other RNA
cagtgagcagcccgacccacc

SEQ ID NO: 19639 - RNA, 22 nt, synthetic construct
  misc_feature 1..22: note = Synthetic
  source 1..22: mol_type = other RNA
gcagtgagcagcccgacccacc

SEQ ID NO: 19640 - RNA, 23 nt, synthetic construct
  misc_feature 1..23: note = Synthetic
  source 1..23: mol_type = other RNA
ggcagtgagcagcccgacccacc

SEQ ID NO: 19641 - RNA, 24 nt, synthetic construct
  misc_feature 1..24: note = Synthetic
  source 1..24: mol_type = other RNA
cggcagtgagcagcccgacccacc

SEQ ID NO: 19642 - RNA, 18 nt, synthetic construct
  misc_feature 1..18: note = Synthetic
  source 1..18: mol_type = other RNA
aacctgccgctgcgcccc

SEQ ID NO: 19643 - RNA, 19 nt, synthetic construct
  misc_feature 1..19: note = Synthetic
  source 1..19: mol_type = other RNA
caacctgccgctgcgcccc

SEQ ID NO: 19644 - RNA, 21 nt, synthetic construct
  misc_feature 1..21: note = Synthetic
  source 1..21: mol_type = other RNA
cacaacctgccgctgcgcccc

SEQ ID NO: 19645 - RNA, 22 nt, synthetic construct
  misc_feature 1..22: note = Synthetic
  source 1..22: mol_type = other RNA
ccacaacctgccgctgcgcccc

SEQ ID NO: 19646 - RNA, 23 nt, synthetic construct
  misc_feature 1..23: note = Synthetic
  source 1..23: mol_type = other RNA
accacaacctgccgctgcgcccc

SEQ ID NO: 19647 - RNA, 24 nt, synthetic construct
  misc_feature 1..24: note = Synthetic
  source 1..24: mol_type = other RNA
caccacaacctgccgctgcgcccc

SEQ ID NO: 19648 - RNA, 18 nt, synthetic construct
  misc_feature 1..18: note = Synthetic
  source 1..18: mol_type = other RNA
tcccgccgcgaatagccc

SEQ ID NO: 19649 - RNA, 19 nt, synthetic construct
  misc_feature 1..19: note = Synthetic
  source 1..19: mol_type = other RNA
ttcccgccgcgaatagccc

SEQ ID NO: 19650 - RNA, 21 nt, synthetic construct
  misc_feature 1..21: note = Synthetic
  source 1..21: mol_type = other RNA
gtttcccgccgcgaatagccc

SEQ ID NO: 19651 - RNA, 22 nt, synthetic construct
  misc_feature 1..22: note = Synthetic
  source 1..22: mol_type = other RNA
cgtttcccgccgcgaatagccc

SEQ ID NO: 19652 - RNA, 23 nt, synthetic construct
  misc_feature 1..23: note = Synthetic
  source 1..23: mol_type = other RNA
ccgtttcccgccgcgaatagccc

SEQ ID NO: 19653 - RNA, 24 nt, synthetic construct
  misc_feature 1..24: note = Synthetic
  source 1..24: mol_type = other RNA
gccgtttcccgccgcgaatagccc

SEQ ID NO: 19654 - RNA, 18 nt, synthetic construct
  misc_feature 1..18: note = Synthetic
  source 1..18: mol_type = other RNA
ccctgggggaccccgccc

SEQ ID NO: 19655 - RNA, 19 nt, synthetic construct
  misc_feature 1..19: note = Synthetic
  source 1..19: mol_type = other RNA
accctgggggaccccgccc

SEQ ID NO: 19656 - RNA, 21 nt, synthetic construct
  misc_feature 1..21: note = Synthetic
  source 1..21: mol_type = other RNA
caaccctgggggaccccgccc

SEQ ID NO: 19657 - RNA, 22 nt, synthetic construct
  misc_feature 1..22: note = Synthetic
  source 1..22: mol_type = other RNA
gcaaccctgggggaccccgccc

SEQ ID NO: 19658 - RNA, 23 nt, synthetic construct
  misc_feature 1..23: note = Synthetic
  source 1..23: mol_type = other RNA
cgcaaccctgggggaccccgccc

SEQ ID NO: 19659 - RNA, 24 nt, synthetic construct
  misc_feature 1..24: note = Synthetic
  source 1..24: mol_type = other RNA
tcgcaaccctgggggaccccgccc

SEQ ID NO: 19660 - RNA, 18 nt, synthetic construct
  misc_feature 1..18: note = Synthetic
  source 1..18: mol_type = other RNA
gcgattgcccccccgccc

SEQ ID NO: 19661 - RNA, 19 nt, synthetic construct
  misc_feature 1..19: note = Synthetic
  source 1..19: mol_type = other RNA
ggcgattgcccccccgccc

SEQ ID NO: 19662 - RNA, 21 nt, synthetic construct
  misc_feature 1..21: note = Synthetic
  source 1..21: mol_type = other RNA
ctggcgattgcccccccgccc

SEQ ID NO: 19663 - RNA, 22 nt, synthetic construct
  misc_feature 1..22: note = Synthetic
  source 1..22: mol_type = other RNA
gctggcgattgcccccccgccc

SEQ ID NO: 19664 - RNA, 23 nt, synthetic construct
  misc_feature 1..23: note = Synthetic
  source 1..23: mol_type = other RNA
cgctggcgattgcccccccgccc

SEQ ID NO: 19665 - RNA, 24 nt, synthetic construct
  misc_feature 1..24: note = Synthetic
  source 1..24: mol_type = other RNA
acgctggcgattgcccccccgccc

SEQ ID NO: 19666 - RNA, 18 nt, synthetic construct
  misc_feature 1..18: note = Synthetic
  source 1..18: mol_type = other RNA
acccccgcgccccggccc

SEQ ID NO: 19667 - RNA, 19 nt, synthetic construct
  misc_feature 1..19: note = Synthetic
  source 1..19: mol_type = other RNA
gacccccgcgccccggccc

SEQ ID NO: 19668 - RNA, 21 nt, synthetic construct
  misc_feature 1..21: note = Synthetic
  source 1..21: mol_type = other RNA
cggacccccgcgccccggccc

SEQ ID NO: 19669 - RNA, 22 nt, synthetic construct
  misc_feature 1..22: note = Synthetic
  source 1..22: mol_type = other RNA
gcggacccccgcgccccggccc

SEQ ID NO: 19670 - RNA, 23 nt, synthetic construct
  misc_feature 1..23: note = Synthetic
  source 1..23: mol_type = other RNA
cgcggacccccgcgccccggccc

SEQ ID NO: 19671 - RNA, 24 nt, synthetic construct
  misc_feature 1..24: note = Synthetic
  source 1..24: mol_type = other RNA
ccgcggacccccgcgccccggccc

SEQ ID NO: 19672 - RNA, 18 nt, synthetic construct
  misc_feature 1..18: note = Synthetic
  source 1..18: mol_type = other RNA
gatgcatttctacctccc

SEQ ID NO: 19673 - RNA, 19 nt, synthetic construct
  misc_feature 1..19: note = Synthetic
  source 1..19: mol_type = other RNA
agatgcatttctacctccc

SEQ ID NO: 19674 - RNA, 21 nt, synthetic construct
  misc_feature 1..21: note = Synthetic
  source 1..21: mol_type = other RNA
gaagatgcatttctacctccc

SEQ ID NO: 19675 - RNA, 22 nt, synthetic construct
  misc_feature 1..22: note = Synthetic
  source 1..22: mol_type = other RNA
agaagatgcatttctacctccc

SEQ ID NO: 19676 - RNA, 23 nt, synthetic construct
  misc_feature 1..23: note = Synthetic
  source 1..23: mol_type = other RNA
gagaagatgcatttctacctccc

SEQ ID NO: 19677 - RNA, 24 nt, synthetic construct
  misc_feature 1..24: note = Synthetic
  source 1..24: mol_type = other RNA
agagaagatgcatttctacctccc

SEQ ID NO: 19678 - RNA, 18 nt, synthetic construct
  misc_feature 1..18: note = Synthetic
  source 1..18: mol_type = other RNA
accctgggggaccccgcc

SEQ ID NO: 19679 - RNA, 19 nt, synthetic construct
  misc_feature 1..19: note = Synthetic
  source 1..19: mol_type = other RNA
aaccctgggggaccccgcc

SEQ ID NO: 19680 - RNA, 21 nt, synthetic construct
  misc_feature 1..21: note = Synthetic
  source 1..21: mol_type = other RNA
gcaaccctgggggaccccgcc

SEQ ID NO: 19681 - RNA, 22 nt, synthetic construct
  misc_feature 1..22: note = Synthetic
  source 1..22: mol_type = other RNA
cgcaaccctgggggaccccgcc

SEQ ID NO: 19682 - RNA, 23 nt, synthetic construct
  misc_feature 1..23: note = Synthetic
  source 1..23: mol_type = other RNA
tcgcaaccctgggggaccccgcc

SEQ ID NO: 19683 - RNA, 24 nt, synthetic construct
  misc_feature 1..24: note = Synthetic
  source 1..24: mol_type = other RNA
atcgcaaccctgggggaccccgcc

SEQ ID NO: 19684 - RNA, 18 nt, synthetic construct
  misc_feature 1..18: note = Synthetic
  source 1..18: mol_type = other RNA
gcgactgcgtgctgcgcc

SEQ ID NO: 19685 - RNA, 19 nt, synthetic construct
  misc_feature 1..19: note = Synthetic
  source 1..19: mol_type = other RNA
cgcgactgcgtgctgcgcc

SEQ ID NO: 19686 - RNA, 21 nt, synthetic construct
  misc_feature 1..21: note = Synthetic
  source 1..21: mol_type = other RNA
tgcgcgactgcgtgctgcgcc

SEQ ID NO: 19687 - RNA, 22 nt, synthetic construct
  misc_feature 1..22: note = Synthetic
  source 1..22: mol_type = other RNA
atgcgcgactgcgtgctgcgcc

SEQ ID NO: 19688 - RNA, 23 nt, synthetic construct
  misc_feature 1..23: note = Synthetic
  source 1..23: mol_type = other RNA
catgcgcgactgcgtgctgcgcc

SEQ ID NO: 19689 - RNA, 24 nt, synthetic construct
  misc_feature 1..24: note = Synthetic
  source 1..24: mol_type = other RNA
ccatgcgcgactgcgtgctgcgcc

SEQ ID NO: 19690 - RNA, 18 nt, synthetic construct
  misc_feature 1..18: note = Synthetic
  source 1..18: mol_type = other RNA
gacccccgcgccccggcc

SEQ ID NO: 19691 - RNA, 19 nt, synthetic construct
  misc_feature 1..19: note = Synthetic
  source 1..19: mol_type = other RNA
ggacccccgcgccccggcc

SEQ ID NO: 19692 - RNA, 21 nt, synthetic construct
  misc_feature 1..21: note = Synthetic
  source 1..21: mol_type = other RNA
gcggacccccgcgccccggcc

SEQ ID NO: 19693 - RNA, 22 nt, synthetic construct
  misc_feature 1..22: note = Synthetic
  source 1..22: mol_type = other RNA
cgcggacccccgcgccccggcc

SEQ ID NO: 19694 - RNA, 23 nt, synthetic construct
  misc_feature 1..23: note = Synthetic
  source 1..23: mol_type = other RNA
ccgcggacccccgcgccccggcc

SEQ ID NO: 19695 - RNA, 24 nt, synthetic construct
  misc_feature 1..24: note = Synthetic
  source 1..24: mol_type = other RNA
cccgcggacccccgcgccccggcc

SEQ ID NO: 19696 - RNA, 18 nt, synthetic construct
  misc_feature 1..18: note = Synthetic
  source 1..18: mol_type = other RNA
ccccggtgctggcgggcc

SEQ ID NO: 19697 - RNA, 19 nt, synthetic construct
  misc_feature 1..19: note = Synthetic
  source 1..19: mol_type = other RNA
gccccggtgctggcgggcc

SEQ ID NO: 19698 - RNA, 21 nt, synthetic construct
  misc_feature 1..21: note = Synthetic
  source 1..21: mol_type = other RNA
gggccccggtgctggcgggcc

SEQ ID NO: 19699 - RNA, 22 nt, synthetic construct
  misc_feature 1..22: note = Synthetic
  source 1..22: mol_type = other RNA
tgggccccggtgctggcgggcc

SEQ ID NO: 19700 - RNA, 23 nt, synthetic construct
  misc_feature 1..23: note = Synthetic
  source 1..23: mol_type = other RNA
ctgggccccggtgctggcgggcc

SEQ ID NO: 19701 - RNA, 24 nt, synthetic construct
  misc_feature 1..24: note = Synthetic
  source 1..24: mol_type = other RNA
cctgggccccggtgctggcgggcc

SEQ ID NO: 19702 - RNA, 18 nt, synthetic construct
  misc_feature 1..18: note = Synthetic
  source 1..18: mol_type = other RNA
cacttttgccggcaatcc

SEQ ID NO: 19703 - RNA, 19 nt, synthetic construct
  misc_feature 1..19: note = Synthetic
  source 1..19: mol_type = other RNA
gcacttttgccggcaatcc

SEQ ID NO: 19704 - RNA, 21 nt, synthetic construct
  misc_feature 1..21: note = Synthetic
  source 1..21: mol_type = other RNA
tcgcacttttgccggcaatcc

SEQ ID NO: 19705 - RNA, 22 nt, synthetic construct
  misc_feature 1..22: note = Synthetic
  source 1..22: mol_type = other RNA
atcgcacttttgccggcaatcc

SEQ ID NO: 19706 - RNA, 23 nt, synthetic construct
  misc_feature 1..23: note = Synthetic
  source 1..23: mol_type = other RNA
tatcgcacttttgccggcaatcc

SEQ ID NO: 19707 - RNA, 24 nt, synthetic construct
  misc_feature 1..24: note = Synthetic
  source 1..24: mol_type = other RNA
ctatcgcacttttgccggcaatcc

SEQ ID NO: 19708 - RNA, 18 nt, synthetic construct
  misc_feature 1..18: note = Synthetic
  source 1..18: mol_type = other RNA
agatgcatttctacctcc

SEQ ID NO: 19709 - RNA, 19 nt, synthetic construct
  misc_feature 1..19: note = Synthetic
  source 1..19: mol_type = other RNA
aagatgcatttctacctcc

SEQ ID NO: 19710 - RNA, 21 nt, synthetic construct
  misc_feature 1..21: note = Synthetic
  source 1..21: mol_type = other RNA
agaagatgcatttctacctcc

SEQ ID NO: 19711 - RNA, 22 nt, synthetic construct
  misc_feature 1..22: note = Synthetic
  source 1..22: mol_type = other RNA
gagaagatgcatttctacctcc

SEQ ID NO: 19712 - RNA, 23 nt, synthetic construct
  misc_feature 1..23: note = Synthetic
  source 1..23: mol_type = other RNA
agagaagatgcatttctacctcc

SEQ ID NO: 19713 - RNA, 24 nt, synthetic construct
  misc_feature 1..24: note = Synthetic
  source 1..24: mol_type = other RNA
gagagaagatgcatttctacctcc

SEQ ID NO: 19714 - RNA, 18 nt, synthetic construct
  misc_feature 1..18: note = Synthetic
  source 1..18: mol_type = other RNA
gagaccagacgggtctcc

SEQ ID NO: 19715 - RNA, 19 nt, synthetic construct
  misc_feature 1..19: note = Synthetic
  source 1..19: mol_type = other RNA
cgagaccagacgggtctcc

SEQ ID NO: 19716 - RNA, 21 nt, synthetic construct
  misc_feature 1..21: note = Synthetic
  source 1..21: mol_type = other RNA
gccgagaccagacgggtctcc

SEQ ID NO: 19717 - RNA, 22 nt, synthetic construct
  misc_feature 1..22: note = Synthetic
  source 1..22: mol_type = other RNA
cgccgagaccagacgggtctcc

SEQ ID NO: 19718 - RNA, 23 nt, synthetic construct
  misc_feature 1..23: note = Synthetic
  source 1..23: mol_type = other RNA
acgccgagaccagacgggtctcc

SEQ ID NO: 19719 - RNA, 24 nt, synthetic construct
  misc_feature 1..24: note = Synthetic
  source 1..24: mol_type = other RNA
gacgccgagaccagacgggtctcc

SEQ ID NO: 19720 - RNA, 18 nt, synthetic construct
  misc_feature 1..18: note = Synthetic
  source 1..18: mol_type = other RNA
gcggtcgaccgcatcagc

SEQ ID NO: 19721 - RNA, 19 nt, synthetic construct
  misc_feature 1..19: note = Synthetic
  source 1..19: mol_type = other RNA
ggcggtcgaccgcatcagc

SEQ ID NO: 19722 - RNA, 21 nt, synthetic construct
  misc_feature 1..21: note = Synthetic
  source 1..21: mol_type = other RNA
gcggcggtcgaccgcatcagc

SEQ ID NO: 19723 - RNA, 22 nt, synthetic construct
  misc_feature 1..22: note = Synthetic
  source 1..22: mol_type = other RNA
cgcggcggtcgaccgcatcagc

SEQ ID NO: 19724 - RNA, 23 nt, synthetic construct
  misc_feature 1..23: note = Synthetic
  source 1..23: mol_type = other RNA
gcgcggcggtcgaccgcatcagc

SEQ ID NO: 19725 - RNA, 24 nt, synthetic construct
  misc_feature 1..24: note = Synthetic
  source 1..24: mol_type = other RNA
cgcgcggcggtcgaccgcatcagc

SEQ ID NO: 19726 - RNA, 18 nt, synthetic construct
  misc_feature 1..18: note = Synthetic
  source 1..18: mol_type = other RNA
atcctagacacgcaccgc

SEQ ID NO: 19727 - RNA, 19 nt, synthetic construct
  misc_feature 1..19: note = Synthetic
  source 1..19: mol_type = other RNA
aatcctagacacgcaccgc

SEQ ID NO: 19728 - RNA, 21 nt, synthetic construct
  misc_feature 1..21: note = Synthetic
  source 1..21: mol_type = other RNA
gaaatcctagacacgcaccgc

SEQ ID NO: 19729 - RNA, 22 nt, synthetic construct
  misc_feature 1..22: note = Synthetic
  source 1..22: mol_type = other RNA
cgaaatcctagacacgcaccgc

SEQ ID NO: 19730 - RNA, 23 nt, synthetic construct
  misc_feature 1..23: note = Synthetic
  source 1..23: mol_type = other RNA
tcgaaatcctagacacgcaccgc

SEQ ID NO: 19731 - RNA, 24 nt, synthetic construct
  misc_feature 1..24: note = Synthetic
  source 1..24: mol_type = other RNA
atcgaaatcctagacacgcaccgc

SEQ ID NO: 19732 - RNA, 18 nt, synthetic construct
  misc_feature 1..18: note = Synthetic
  source 1..18: mol_type = other RNA
ccagtgctacctgaaggc

SEQ ID NO: 19733 - RNA, 19 nt, synthetic construct
  misc_feature 1..19: note = Synthetic
  source 1..19: mol_type = other RNA
tccagtgctacctgaaggc

SEQ ID NO: 19734 - RNA, 21 nt, synthetic construct
  misc_feature 1..21: note = Synthetic
  source 1..21: mol_type = other RNA
tctccagtgctacctgaaggc

SEQ ID NO: 19735 - RNA, 22 nt, synthetic construct
  misc_feature 1..22: note = Synthetic
  source 1..22: mol_type = other RNA
ttctccagtgctacctgaaggc

SEQ ID NO: 19736 - RNA, 23 nt, synthetic construct
  misc_feature 1..23: note = Synthetic
  source 1..23: mol_type = other RNA
tttctccagtgctacctgaaggc

SEQ ID NO: 19737 - RNA, 24 nt, synthetic construct
  misc_feature 1..24: note = Synthetic
  source 1..24: mol_type = other RNA
ctttctccagtgctacctgaaggc

SEQ ID NO: 19738 - RNA, 18 nt, synthetic construct
  misc_feature 1..18: note = Synthetic
  source 1..18: mol_type = other RNA
accttggtcgcccacggc

SEQ ID NO: 19739 - RNA, 19 nt, synthetic construct
  misc_feature 1..19: note = Synthetic
  source 1..19: mol_type = other RNA
aaccttggtcgcccacggc

SEQ ID NO: 19740 - RNA, 21 nt, synthetic construct
  misc_feature 1..21: note = Synthetic
  source 1..21: mol_type = other RNA
gaaaccttggtcgcccacggc

SEQ ID NO: 19741 - RNA, 22 nt, synthetic construct
  misc_feature 1..22: note = Synthetic
  source 1..22: mol_type = other RNA
ggaaaccttggtcgcccacggc

SEQ ID NO: 19742 - RNA, 23 nt, synthetic construct
  misc_feature 1..23: note = Synthetic
  source 1..23: mol_type = other RNA
gggaaaccttggtcgcccacggc

SEQ ID NO: 19743 - RNA, 24 nt, synthetic construct
  misc_feature 1..24: note = Synthetic
  source 1..24: mol_type = other RNA
tgggaaaccttggtcgcccacggc

SEQ ID NO: 19744 - RNA, 18 nt, synthetic construct
  misc_feature 1..18: note = Synthetic
  source 1..18: mol_type = other RNA
gcgcgaggcctgtgcggc

SEQ ID NO: 19745 - RNA, 19 nt, synthetic construct
  misc_feature 1..19: note = Synthetic
  source 1..19: mol_type = other RNA
ggcgcgaggcctgtgcggc

SEQ ID NO: 19746 - RNA, 21 nt, synthetic construct
  misc_feature 1..21: note = Synthetic
  source 1..21: mol_type = other RNA
aaggcgcgaggcctgtgcggc

SEQ ID NO: 19747 - RNA, 22 nt, synthetic construct
  misc_feature 1..22: note = Synthetic
  source 1..22: mol_type = other RNA
gaaggcgcgaggcctgtgcggc

SEQ ID NO: 19748 - RNA, 23 nt, synthetic construct
  misc_feature 1..23: note = Synthetic
  source 1..23: mol_type = other RNA
tgaaggcgcgaggcctgtgcggc

SEQ ID NO: 19749 - RNA, 24 nt, synthetic construct
  misc_feature 1..24: note = Synthetic
  source 1..24: mol_type = other RNA
ctgaaggcgcgaggcctgtgcggc

SEQ ID NO: 19750 - RNA, 18 nt, synthetic construct
  misc_feature 1..18: note = Synthetic
  source 1..18: mol_type = other RNA
cgagaccagacgggtctc

SEQ ID NO: 19751 - RNA, 19 nt, synthetic construct
  misc_feature 1..19: note = Synthetic
  source 1..19: mol_type = other RNA
ccgagaccagacgggtctc

SEQ ID NO: 19752 - RNA, 21 nt, synthetic construct
  misc_feature 1..21: note = Synthetic
  source 1..21: mol_type = other RNA
cgccgagaccagacgggtctc

SEQ ID NO: 19753 - RNA, 22 nt, synthetic construct
  misc_feature 1..22: note = Synthetic
  source 1..22: mol_type = other RNA
acgccgagaccagacgggtctc

SEQ ID NO: 19754 - RNA, 23 nt, synthetic construct
  misc_feature 1..23: note = Synthetic
  source 1..23: mol_type = other RNA
gacgccgagaccagacgggtctc

SEQ ID NO: 19755 - RNA, 24 nt, synthetic construct
  misc_feature 1..24: note = Synthetic
  source 1..24: mol_type = other RNA
tgacgccgagaccagacgggtctc

SEQ ID NO: 19756 - RNA, 18 nt, synthetic construct
  misc_feature 1..18: note = Synthetic
  source 1..18: mol_type = other RNA
cgcgtcgagcgtggcgtc

SEQ ID NO: 19757 - RNA, 19 nt, synthetic construct
  misc_feature 1..19: note = Synthetic
  source 1..19: mol_type = other RNA
ccgcgtcgagcgtggcgtc

SEQ ID NO: 19758 - RNA, 21 nt, synthetic construct
  misc_feature 1..21: note = Synthetic
  source 1..21: mol_type = other RNA
aaccgcgtcgagcgtggcgtc

SEQ ID NO: 19759 - RNA, 22 nt, synthetic construct
  misc_feature 1..22: note = Synthetic
  source 1..22: mol_type = other RNA
caaccgcgtcgagcgtggcgtc

SEQ ID NO: 19760 - RNA, 23 nt, synthetic construct
  misc_feature 1..23: note = Synthetic
  source 1..23: mol_type = other RNA
ccaaccgcgtcgagcgtggcgtc

SEQ ID NO: 19761 - RNA, 24 nt, synthetic construct
  misc_feature 1..24: note = Synthetic
  source 1..24: mol_type = other RNA
gccaaccgcgtcgagcgtggcgtc

SEQ ID NO: 19762 - RNA, 18 nt, synthetic construct
  misc_feature 1..18: note = Synthetic
  source 1..18: mol_type = other RNA
cggtgctggcgggccaag

SEQ ID NO: 19763 - RNA, 19 nt, synthetic construct
  misc_feature 1..19: note = Synthetic
  source 1..19: mol_type = other RNA
ccggtgctggcgggccaag

SEQ ID NO: 19764 - RNA, 21 nt, synthetic construct
  misc_feature 1..21: note = Synthetic
  source 1..21: mol_type = other RNA
ccccggtgctggcgggccaag

SEQ ID NO: 19765 - RNA, 22 nt, synthetic construct
  misc_feature 1..22: note = Synthetic
  source 1..22: mol_type = other RNA
gccccggtgctggcgggccaag

SEQ ID NO: 19766 - RNA, 23 nt, synthetic construct
  misc_feature 1..23: note = Synthetic
  source 1..23: mol_type = other RNA
ggccccggtgctggcgggccaag

SEQ ID NO: 19767 - RNA, 24 nt, synthetic construct
  misc_feature 1..24: note = Synthetic
  source 1..24: mol_type = other RNA
gggccccggtgctggcgggccaag

SEQ ID NO: 19768 - RNA, 18 nt, synthetic construct
  misc_feature 1..18: note = Synthetic
  source 1..18: mol_type = other RNA
aaggagggccctttgacg

SEQ ID NO: 19769 - RNA, 19 nt, synthetic construct
  misc_feature 1..19: note = Synthetic
  source 1..19: mol_type = other RNA
caaggagggccctttgacg

SEQ ID NO: 19770 - RNA, 21 nt, synthetic construct
  misc_feature 1..21: note = Synthetic
  source 1..21: mol_type = other RNA
gccaaggagggccctttgacg

SEQ ID NO: 19771 - RNA, 22 nt, synthetic construct
  misc_feature 1..22: note = Synthetic
  source 1..22: mol_type = other RNA
ggccaaggagggccctttgacg

SEQ ID NO: 19772 - RNA, 23 nt, synthetic construct
  misc_feature 1..23: note = Synthetic
  source 1..23: mol_type = other RNA
gggccaaggagggccctttgacg

SEQ ID NO: 19773 - RNA, 24 nt, synthetic construct
  misc_feature 1..24: note = Synthetic
  source 1..24: mol_type = other RNA
cgggccaaggagggccctttgacg

SEQ ID NO: 19774 - RNA, 18 nt, synthetic construct
  misc_feature 1..18: note = Synthetic
  source 1..18: mol_type = other RNA
aggcgctggcctccgccg

SEQ ID NO: 19775 - RNA, 19 nt, synthetic construct
  misc_feature 1..19: note = Synthetic
  source 1..19: mol_type = other RNA
gaggcgctggcctccgccg

SEQ ID NO: 19776 - RNA, 21 nt, synthetic construct
  misc_feature 1..21: note = Synthetic
  source 1..21: mol_type = other RNA
tcgaggcgctggcctccgccg

SEQ ID NO: 19777 - RNA, 22 nt, synthetic construct
  misc_feature 1..22: note = Synthetic
  source 1..22: mol_type = other RNA
atcgaggcgctggcctccgccg

SEQ ID NO: 19778 - RNA, 23 nt, synthetic construct
  misc_feature 1..23: note = Synthetic
  source 1..23: mol_type = other RNA
catcgaggcgctggcctccgccg

SEQ ID NO: 19779 - RNA, 24 nt, synthetic construct
  misc_feature 1..24: note = Synthetic
  source 1..24: mol_type = other RNA
tcatcgaggcgctggcctccgccg

SEQ ID NO: 19780 - RNA, 18 nt, synthetic construct
  misc_feature 1..18: note = Synthetic
  source 1..18: mol_type = other RNA
ccaggctcgccaaccgcg

SEQ ID NO: 19781 - RNA, 19 nt, synthetic construct
  misc_feature 1..19: note = Synthetic
  source 1..19: mol_type = other RNA
gccaggctcgccaaccgcg

SEQ ID NO: 19782 - RNA, 21 nt, synthetic construct
  misc_feature 1..21: note = Synthetic
  source 1..21: mol_type = other RNA
tggccaggctcgccaaccgcg

SEQ ID NO: 19783 - RNA, 22 nt, synthetic construct
  misc_feature 1..22: note = Synthetic
  source 1..22: mol_type = other RNA
ctggccaggctcgccaaccgcg

SEQ ID NO: 19784 - RNA, 23 nt, synthetic construct
  misc_feature 1..23: note = Synthetic
  source 1..23: mol_type = other RNA
tctggccaggctcgccaaccgcg

SEQ ID NO: 19785 - RNA, 24 nt, synthetic construct
  misc_feature 1..24: note = Synthetic
  source 1..24: mol_type = other RNA
ttctggccaggctcgccaaccgcg

SEQ ID NO: 19786 - RNA, 18 nt, synthetic construct
  misc_feature 1..18: note = Synthetic
  source 1..18: mol_type = other RNA
gcgtcgagcgtggcgtcg

SEQ ID NO: 19787 - RNA, 19 nt, synthetic construct
  misc_feature 1..19: note = Synthetic
  source 1..19: mol_type = other RNA
cgcgtcgagcgtggcgtcg

SEQ ID NO: 19788 - RNA, 21 nt, synthetic construct
  misc_feature 1..21: note = Synthetic
  source 1..21: mol_type = other RNA
accgcgtcgagcgtggcgtcg

SEQ ID NO: 19789 - RNA, 22 nt, synthetic construct
  misc_feature 1..22: note = Synthetic
  source 1..22: mol_type = other RNA
aaccgcgtcgagcgtggcgtcg

SEQ ID NO: 19790 - RNA, 23 nt, synthetic construct
  misc_feature 1..23: note = Synthetic
  source 1..23: mol_type = other RNA
caaccgcgtcgagcgtggcgtcg

SEQ ID NO: 19791 - RNA, 24 nt, synthetic construct
  misc_feature 1..24: note = Synthetic
  source 1..24: mol_type = other RNA
ccaaccgcgtcgagcgtggcgtcg

SEQ ID NO: 19792 - RNA, 18 nt, synthetic construct
  misc_feature 1..18: note = Synthetic
  source 1..18: mol_type = other RNA
cccttggtgtcggggtcg

SEQ ID NO: 19793 - RNA, 19 nt, synthetic construct
  misc_feature 1..19: note = Synthetic
  source 1..19: mol_type = other RNA
acccttggtgtcggggtcg

SEQ ID NO: 19794 - RNA, 21 nt, synthetic construct
  misc_feature 1..21: note = Synthetic
  source 1..21: mol_type = other RNA
cgacccttggtgtcggggtcg

SEQ ID NO: 19795 - RNA, 22 nt, synthetic construct
  misc_feature 1..22: note = Synthetic
  source 1..22: mol_type = other RNA
gcgacccttggtgtcggggtcg

SEQ ID NO: 19796 - RNA, 23 nt, synthetic construct
  misc_feature 1..23: note = Synthetic
  source 1..23: mol_type = other RNA
cgcgacccttggtgtcggggtcg

SEQ ID NO: 19797 - RNA, 24 nt, synthetic construct
  misc_feature 1..24: note = Synthetic
  source 1..24: mol_type = other RNA
acgcgacccttggtgtcggggtcg

SEQ ID NO: 19798 - RNA, 18 nt, synthetic construct
  misc_feature 1..18: note = Synthetic
  source 1..18: mol_type = other RNA
gggggaccccgccccggg

SEQ ID NO: 19799 - RNA, 19 nt, synthetic construct
  misc_feature 1..19: note = Synthetic
  source 1..19: mol_type = other RNA
tgggggaccccgccccggg

SEQ ID NO: 19800 - RNA, 21 nt, synthetic construct
  misc_feature 1..21: note = Synthetic
  source 1..21: mol_type = other RNA
cctgggggaccccgccccggg

SEQ ID NO: 19801 - RNA, 22 nt, synthetic construct
  misc_feature 1..22: note = Synthetic
  source 1..22: mol_type = other RNA
ccctgggggaccccgccccggg

SEQ ID NO: 19802 - RNA, 23 nt, synthetic construct
  misc_feature 1..23: note = Synthetic
  source 1..23: mol_type = other RNA
accctgggggaccccgccccggg

SEQ ID NO: 19803 - RNA, 24 nt, synthetic construct
  misc_feature 1..24: note = Synthetic
  source 1..24: mol_type = other RNA
aaccctgggggaccccgccccggg

SEQ ID NO: 19804 - RNA, 18 nt, synthetic construct
  misc_feature 1..18: note = Synthetic
  source 1..18: mol_type = other RNA
accccgccccggggcggg

SEQ ID NO: 19805 - RNA, 19 nt, synthetic construct
  misc_feature 1..19: note = Synthetic
  source 1..19: mol_type = other RNA
gaccccgccccggggcggg

SEQ ID NO: 19806 - RNA, 21 nt, synthetic construct
  misc_feature 1..21: note = Synthetic
  source 1..21: mol_type = other RNA
gggaccccgccccggggcggg

SEQ ID NO: 19807 - RNA, 22 nt, synthetic construct
  misc_feature 1..22: note = Synthetic
  source 1..22: mol_type = other RNA
ggggaccccgccccggggcggg

SEQ ID NO: 19808 - RNA, 23 nt, synthetic construct
  misc_feature 1..23: note = Synthetic
  source 1..23: mol_type = other RNA
gggggaccccgccccggggcggg

SEQ ID NO: 19809 - RNA, 24 nt, synthetic construct
  misc_feature 1..24: note = Synthetic
  source 1..24: mol_type = other RNA
tgggggaccccgccccggggcggg

SEQ ID NO: 19810 - RNA, 18 nt, synthetic construct
  misc_feature 1..18: note = Synthetic
  source 1..18: mol_type = other RNA
cgacccttggtgtcgggg

SEQ ID NO: 19811 - RNA, 19 nt, synthetic construct
  misc_feature 1..19: note = Synthetic
  source 1..19: mol_type = other RNA
gcgacccttggtgtcgggg

SEQ ID NO: 19812 - RNA, 21 nt, synthetic construct
  misc_feature 1..21: note = Synthetic
  source 1..21: mol_type = other RNA
acgcgacccttggtgtcgggg

SEQ ID NO: 19813 - RNA, 22 nt, synthetic construct
  misc_feature 1..22: note = Synthetic
  source 1..22: mol_type = other RNA
tacgcgacccttggtgtcgggg

SEQ ID NO: 19814 - RNA, 23 nt, synthetic construct
  misc_feature 1..23: note = Synthetic
  source 1..23: mol_type = other RNA
ctacgcgacccttggtgtcgggg

SEQ ID NO: 19815 - RNA, 24 nt, synthetic construct
  misc_feature 1..24: note = Synthetic
  source 1..24: mol_type = other RNA
actacgcgacccttggtgtcgggg

SEQ ID NO: 19816 - RNA, 18 nt, synthetic construct
  misc_feature 1..18: note = Synthetic
  source 1..18: mol_type = other RNA
gaggcctgtgcggcctgg

SEQ ID NO: 19817 - RNA, 19 nt, synthetic construct
  misc_feature 1..19: note = Synthetic
  source 1..19: mol_type = other RNA
cgaggcctgtgcggcctgg

SEQ ID NO: 19818 - RNA, 21 nt, synthetic construct
  misc_feature 1..21: note = Synthetic
  source 1..21: mol_type = other RNA
cgcgaggcctgtgcggcctgg

SEQ ID NO: 19819 - RNA, 22 nt, synthetic construct
  misc_feature 1..22: note = Synthetic
  source 1..22: mol_type = other RNA
gcgcgaggcctgtgcggcctgg

SEQ ID NO: 19820 - RNA, 23 nt, synthetic construct
  misc_feature 1..23: note = Synthetic
  source 1..23: mol_type = other RNA
ggcgcgaggcctgtgcggcctgg

SEQ ID NO: 19821 - RNA, 24 nt, synthetic construct
  misc_feature 1..24: note = Synthetic
  source 1..24: mol_type = other RNA
aggcgcgaggcctgtgcggcctgg

SEQ ID NO: 19822 - RNA, 18 nt, synthetic construct
  misc_feature 1..18: note = Synthetic
  source 1..18: mol_type = other RNA
cgccccggggcggggtgg

SEQ ID NO: 19823 - RNA, 19 nt, synthetic construct
  misc_feature 1..19: note = Synthetic
  source 1..19: mol_type = other RNA
ccgccccggggcggggtgg

SEQ ID NO: 19824 - RNA, 21 nt, synthetic construct
  misc_feature 1..21: note = Synthetic
  source 1..21: mol_type = other RNA
ccccgccccggggcggggtgg

SEQ ID NO: 19825 - RNA, 22 nt, synthetic construct
  misc_feature 1..22: note = Synthetic
  source 1..22: mol_type = other RNA
accccgccccggggcggggtgg

SEQ ID NO: 19826 - RNA, 23 nt, synthetic construct
  misc_feature 1..23: note = Synthetic
  source 1..23: mol_type = other RNA
gaccccgccccggggcggggtgg

SEQ ID NO: 19827 - RNA, 24 nt, synthetic construct
  misc_feature 1..24: note = Synthetic
  source 1..24: mol_type = other RNA
ggaccccgccccggggcggggtgg

SEQ ID NO: 19828 - RNA, 18 nt, synthetic construct
  misc_feature 1..18: note = Synthetic
  source 1..18: mol_type = other RNA
gccccggcgccccccatg

SEQ ID NO: 19829 - RNA, 19 nt, synthetic construct
  misc_feature 1..19: note = Synthetic
  source 1..19: mol_type = other RNA
ggccccggcgccccccatg

SEQ ID NO: 19830 - RNA, 21 nt, synthetic construct
  misc_feature 1..21: note = Synthetic
  source 1..21: mol_type = other RNA
acggccccggcgccccccatg

SEQ ID NO: 19831 - RNA, 22 nt, synthetic construct
  misc_feature 1..22: note = Synthetic
  source 1..22: mol_type = other RNA
gacggccccggcgccccccatg

SEQ ID NO: 19832 - RNA, 23 nt, synthetic construct
  misc_feature 1..23: note = Synthetic
  source 1..23: mol_type = other RNA
ggacggccccggcgccccccatg

SEQ ID NO: 19833 - RNA, 24 nt, synthetic construct
  misc_feature 1..24: note = Synthetic
  source 1..24: mol_type = other RNA
cggacggccccggcgccccccatg

SEQ ID NO: 19834 - RNA, 18 nt, synthetic construct
  misc_feature 1..18: note = Synthetic
  source 1..18: mol_type = other RNA
ctccccggggcctgcatg

SEQ ID NO: 19835 - RNA, 19 nt, synthetic construct
  misc_feature 1..19: note = Synthetic
  source 1..19: mol_type = other RNA
cctccccggggcctgcatg

SEQ ID NO: 19836 - RNA, 21 nt, synthetic construct
  misc_feature 1..21: note = Synthetic
  source 1..21: mol_type = other RNA
tacctccccggggcctgcatg

SEQ ID NO: 19837 - RNA, 22 nt, synthetic construct
  misc_feature 1..22: note = Synthetic
  source 1..22: mol_type = other RNA
ctacctccccggggcctgcatg

SEQ ID NO: 19838 - RNA, 23 nt, synthetic construct
  misc_feature 1..23: note = Synthetic
  source 1..23: mol_type = other RNA
tctacctccccggggcctgcatg

SEQ ID NO: 19839 - RNA, 24 nt, synthetic construct
  misc_feature 1..24: note = Synthetic
  source 1..24: mol_type = other RNA
ttctacctccccggggcctgcatg

SEQ ID NO: 19840 - RNA, 18 nt, synthetic construct
  misc_feature 1..18: note = Synthetic
  source 1..18: mol_type = other RNA
ccctgggccccggtgctg

SEQ ID NO: 19841 - RNA, 19 nt, synthetic construct
  misc_feature 1..19: note = Synthetic
  source 1..19: mol_type = other RNA
cccctgggccccggtgctg

SEQ ID NO: 19842 - RNA, 21 nt, synthetic construct
  misc_feature 1..21: note = Synthetic
  source 1..21: mol_type = other RNA
agcccctgggccccggtgctg

SEQ ID NO: 19843 - RNA, 22 nt, synthetic construct
  misc_feature 1..22: note = Synthetic
  source 1..22: mol_type = other RNA
tagcccctgggccccggtgctg

SEQ ID NO: 19844 - RNA, 23 nt, synthetic construct
  misc_feature 1..23: note = Synthetic
  source 1..23: mol_type = other RNA
atagcccctgggccccggtgctg

SEQ ID NO: 19845 - RNA, 24 nt, synthetic construct
  misc_feature 1..24: note = Synthetic
  source 1..24: mol_type = other RNA
aatagcccctgggccccggtgctg

SEQ ID NO: 19846 - RNA, 18 nt, synthetic construct
  misc_feature 1..18: note = Synthetic
  source 1..18: mol_type = other RNA
tgttcgcggcggcgtctg

SEQ ID NO: 19847 - RNA, 19 nt, synthetic construct
  misc_feature 1..19: note = Synthetic
  source 1..19: mol_type = other RNA
gtgttcgcggcggcgtctg

SEQ ID NO: 19848 - RNA, 21 nt, synthetic construct
  misc_feature 1..21: note = Synthetic
  source 1..21: mol_type = other RNA
ctgtgttcgcggcggcgtctg

SEQ ID NO: 19849 - RNA, 22 nt, synthetic construct
  misc_feature 1..22: note = Synthetic
  source 1..22: mol_type = other RNA
actgtgttcgcggcggcgtctg

SEQ ID NO: 19850 - RNA, 23 nt, synthetic construct
  misc_feature 1..23: note = Synthetic
  source 1..23: mol_type = other RNA
aactgtgttcgcggcggcgtctg

SEQ ID NO: 19851 - RNA, 24 nt, synthetic construct
  misc_feature 1..24: note = Synthetic
  source 1..24: mol_type = other RNA
gaactgtgttcgcggcggcgtctg

SEQ ID NO: 19852 - RNA, 18 nt, synthetic construct
  misc_feature 1..18: note = Synthetic
  source 1..18: mol_type = other RNA
actacgcgacccttggtg

SEQ ID NO: 19853 - RNA, 19 nt, synthetic construct
  misc_feature 1..19: note = Synthetic
  source 1..19: mol_type = other RNA
gactacgcgacccttggtg

SEQ ID NO: 19854 - RNA, 21 nt, synthetic construct
  misc_feature 1..21: note = Synthetic
  source 1..21: mol_type = other RNA
tcgactacgcgacccttggtg

SEQ ID NO: 19855 - RNA, 22 nt, synthetic construct
  misc_feature 1..22: note = Synthetic
  source 1..22: mol_type = other RNA
atcgactacgcgacccttggtg

SEQ ID NO: 19856 - RNA, 23 nt, synthetic construct
  misc_feature 1..23: note = Synthetic
  source 1..23: mol_type = other RNA
gatcgactacgcgacccttggtg

SEQ ID NO: 19857 - RNA, 24 nt, synthetic construct
  misc_feature 1..24: note = Synthetic
  source 1..24: mol_type = other RNA
agatcgactacgcgacccttggtg

SEQ ID NO: 19858 - RNA, 18 nt, synthetic construct
  misc_feature 1..18: note = Synthetic
  source 1..18: mol_type = other RNA
tcatgcacgacccctttg

SEQ ID NO: 19859 - RNA, 19 nt, synthetic construct
  misc_feature 1..19: note = Synthetic
  source 1..19: mol_type = other RNA
gtcatgcacgacccctttg

SEQ ID NO: 19860 - RNA, 21 nt, synthetic construct
  misc_feature 1..21: note = Synthetic
  source 1..21: mol_type = other RNA
aggtcatgcacgacccctttg

SEQ ID NO: 19861 - RNA, 22 nt, synthetic construct
  misc_feature 1..22: note = Synthetic
  source 1..22: mol_type = other RNA
caggtcatgcacgacccctttg

SEQ ID NO: 19862 - RNA, 23 nt, synthetic construct
  misc_feature 1..23: note = Synthetic
  source 1..23: mol_type = other RNA
acaggtcatgcacgacccctttg

SEQ ID NO: 19863 - RNA, 24 nt, synthetic construct
  misc_feature 1..24: note = Synthetic
  source 1..24: mol_type = other RNA
cacaggtcatgcacgacccctttg

SEQ ID NO: 19864 - RNA, 18 nt, synthetic construct
  misc_feature 1..18: note = Synthetic
  source 1..18: mol_type = other RNA
cccccaggaccccattat

SEQ ID NO: 19865 - RNA, 19 nt, synthetic construct
  misc_feature 1..19: note = Synthetic
  source 1..19: mol_type = other RNA
gcccccaggaccccattat

SEQ ID NO: 19866 - RNA, 21 nt, synthetic construct
  misc_feature 1..21: note = Synthetic
  source 1..21: mol_type = other RNA
gcgcccccaggaccccattat

SEQ ID NO: 19867 - RNA, 22 nt, synthetic construct
  misc_feature 1..22: note = Synthetic
  source 1..22: mol_type = other RNA
tgcgcccccaggaccccattat

SEQ ID NO: 19868 - RNA, 23 nt, synthetic construct
  misc_feature 1..23: note = Synthetic
  source 1..23: mol_type = other RNA
ctgcgcccccaggaccccattat

SEQ ID NO: 19869 - RNA, 24 nt, synthetic construct
  misc_feature 1..24: note = Synthetic
  source 1..24: mol_type = other RNA
gctgcgcccccaggaccccattat

SEQ ID NO: 19870 - RNA, 18 nt, synthetic construct
  misc_feature 1..18: note = Synthetic
  source 1..18: mol_type = other RNA
aggtcatgcacgacccct

SEQ ID NO: 19871 - RNA, 19 nt, synthetic construct
  misc_feature 1..19: note = Synthetic
  source 1..19: mol_type = other RNA
caggtcatgcacgacccct

SEQ ID NO: 19872 - RNA, 21 nt, synthetic construct
  misc_feature 1..21: note = Synthetic
  source 1..21: mol_type = other RNA
cacaggtcatgcacgacccct

SEQ ID NO: 19873 - RNA, 22 nt, synthetic construct
  misc_feature 1..22: note = Synthetic
  source 1..22: mol_type = other RNA
gcacaggtcatgcacgacccct

SEQ ID NO: 19874 - RNA, 23 nt, synthetic construct
  misc_feature 1..23: note = Synthetic
  source 1..23: mol_type = other RNA
cgcacaggtcatgcacgacccct

SEQ ID NO: 19875 - RNA, 24 nt, synthetic construct
  misc_feature 1..24: note = Synthetic
  source 1..24: mol_type = other RNA
gcgcacaggtcatgcacgacccct

SEQ ID NO: 19876 - RNA, 18 nt, synthetic construct
  misc_feature 1..18: note = Synthetic
  source 1..18: mol_type = other RNA
agaccagacgggtctcct

SEQ ID NO: 19877 - RNA, 19 nt, synthetic construct
  misc_feature 1..19: note = Synthetic
  source 1..19: mol_type = other RNA
gagaccagacgggtctcct

SEQ ID NO: 19878 - RNA, 21 nt, synthetic construct
  misc_feature 1..21: note = Synthetic
  source 1..21: mol_type = other RNA
ccgagaccagacgggtctcct

SEQ ID NO: 19879 - RNA, 22 nt, synthetic construct
  misc_feature 1..22: note = Synthetic
  source 1..22: mol_type = other RNA
gccgagaccagacgggtctcct

SEQ ID NO: 19880 - RNA, 23 nt, synthetic construct
  misc_feature 1..23: note = Synthetic
  source 1..23: mol_type = other RNA
cgccgagaccagacgggtctcct

SEQ ID NO: 19881 - RNA, 24 nt, synthetic construct
  misc_feature 1..24: note = Synthetic
  source 1..24: mol_type = other RNA
acgccgagaccagacgggtctcct

SEQ ID NO: 19882 - RNA, 18 nt, synthetic construct
  misc_feature 1..18: note = Synthetic
  source 1..18: mol_type = other RNA
tggtcctgcgctccatct

SEQ ID NO: 19883 - RNA, 19 nt, synthetic construct
  misc_feature 1..19: note = Synthetic
  source 1..19: mol_type = other RNA
ttggtcctgcgctccatct

SEQ ID NO: 19884 - RNA, 21 nt, synthetic construct
  misc_feature 1..21: note = Synthetic
  source 1..21: mol_type = other RNA
ggttggtcctgcgctccatct

SEQ ID NO: 19885 - RNA, 22 nt, synthetic construct
  misc_feature 1..22: note = Synthetic
  source 1..22: mol_type = other RNA
cggttggtcctgcgctccatct

SEQ ID NO: 19886 - RNA, 23 nt, synthetic construct
  misc_feature 1..23: note = Synthetic
  source 1..23: mol_type = other RNA
gcggttggtcctgcgctccatct

SEQ ID NO: 19887 - RNA, 24 nt, synthetic construct
  misc_feature 1..24: note = Synthetic
  source 1..24: mol_type = other RNA
cgcggttggtcctgcgctccatct

SEQ ID NO: 19888 - RNA, 18 nt, synthetic construct
  misc_feature 1..18: note = Synthetic
  source 1..18: mol_type = other RNA
gacccttggtgtcggggt

SEQ ID NO: 19889 - RNA, 19 nt, synthetic construct
  misc_feature 1..19: note = Synthetic
  source 1..19: mol_type = other RNA
cgacccttggtgtcggggt

SEQ ID NO: 19890 - RNA, 21 nt, synthetic construct
  misc_feature 1..21: note = Synthetic
  source 1..21: mol_type = other RNA
cgcgacccttggtgtcggggt

SEQ ID NO: 19891 - RNA, 22 nt, synthetic construct
  misc_feature 1..22: note = Synthetic
  source 1..22: mol_type = other RNA
acgcgacccttggtgtcggggt

SEQ ID NO: 19892 - RNA, 23 nt, synthetic construct
  misc_feature 1..23: note = Synthetic
  source 1..23: mol_type = other RNA
tacgcgacccttggtgtcggggt

SEQ ID NO: 19893 - RNA, 24 nt, synthetic construct
  misc_feature 1..24: note = Synthetic
  source 1..24: mol_type = other RNA
ctacgcgacccttggtgtcggggt

SEQ ID NO: 19894 - RNA, 18 nt, synthetic construct
  misc_feature 1..18: note = Synthetic
  source 1..18: mol_type = other RNA
cggcgtctggcggacatt

SEQ ID NO: 19895 - RNA, 19 nt, synthetic construct
  misc_feature 1..19: note = Synthetic
  source 1..19: mol_type = other RNA
gcggcgtctggcggacatt

SEQ ID NO: 19896 - RNA, 21 nt, synthetic construct
  misc_feature 1..21: note = Synthetic
  source 1..21: mol_type = other RNA
cggcggcgtctggcggacatt

SEQ ID NO: 19897 - RNA, 22 nt, synthetic construct
  misc_feature 1..22: note = Synthetic
  source 1..22: mol_type = other RNA
gcggcggcgtctggcggacatt

SEQ ID NO: 19898 - RNA, 23 nt, synthetic construct
  misc_feature 1..23: note = Synthetic
  source 1..23: mol_type = other RNA
cgcggcggcgtctggcggacatt

SEQ ID NO: 19899 - RNA, 24 nt, synthetic construct
  misc_feature 1..24: note = Synthetic
  source 1..24: mol_type = other RNA
tcgcggcggcgtctggcggacatt

SEQ ID NO: 19900 - RNA, 18 nt, synthetic construct
  misc_feature 1..18: note = Synthetic
  source 1..18: mol_type = other RNA
ggtcatgcacgacccctt

SEQ ID NO: 19901 - RNA, 19 nt, synthetic construct
  misc_feature 1..19: note = Synthetic
  source 1..19: mol_type = other RNA
aggtcatgcacgacccctt

SEQ ID NO: 19902 - RNA, 21 nt, synthetic construct
  misc_feature 1..21: note = Synthetic
  source 1..21: mol_type = other RNA
acaggtcatgcacgacccctt

SEQ ID NO: 19903 - RNA, 22 nt, synthetic construct
  misc_feature 1..22: note = Synthetic
  source 1..22: mol_type = other RNA
cacaggtcatgcacgacccctt

SEQ ID NO: 19904 - RNA, 23 nt, synthetic construct
  misc_feature 1..23: note = Synthetic
  source 1..23: mol_type = other RNA
gcacaggtcatgcacgacccctt

SEQ ID NO: 19905 - RNA, 24 nt, synthetic construct
  misc_feature 1..24: note = Synthetic
  source 1..24: mol_type = other RNA
cgcacaggtcatgcacgacccctt

SEQ ID NO: 19906 - RNA, 18 nt, synthetic construct
  misc_feature 1..18: note = Synthetic
  source 1..18: mol_type = other RNA
gtcatgcacgaccccttt

SEQ ID NO: 19907 - RNA, 19 nt, synthetic construct
  misc_feature 1..19: note = Synthetic
  source 1..19: mol_type = other RNA
ggtcatgcacgaccccttt

SEQ ID NO: 19908 - RNA, 21 nt, synthetic construct
  misc_feature 1..21: note = Synthetic
  source 1..21: mol_type = other RNA
caggtcatgcacgaccccttt

SEQ ID NO: 19909 - RNA, 22 nt, synthetic construct
  misc_feature 1..22: note = Synthetic
  source 1..22: mol_type = other RNA
acaggtcatgcacgaccccttt

SEQ ID NO: 19910 - RNA, 23 nt, synthetic construct
  misc_feature 1..23: note = Synthetic
  source 1..23: mol_type = other RNA
cacaggtcatgcacgaccccttt

SEQ ID NO: 19911 - RNA, 24 nt, synthetic construct
  misc_feature 1..24: note = Synthetic
  source 1..24: mol_type = other RNA
gcacaggtcatgcacgaccccttt

SEQ ID NO: 19912 - RNA, 17 nt, synthetic construct
  misc_feature 1..17: note = Synthetic
  source 1..17: mol_type = other RNA
gaacactccccgctgct

SEQ ID NO: 19913 - RNA, 20 nt, synthetic construct
  misc_feature 1..20: note = Synthetic
  source 1..20: mol_type = other RNA
gaggaacactccccgctgct

SEQ ID NO: 19914 - RNA, 17 nt, synthetic construct
  misc_feature 1..17: note = Synthetic
  source 1..17: mol_type = other RNA
cgtccgccgcgggcagg

SEQ ID NO: 19915 - RNA, 17 nt, synthetic construct
  misc_feature 1..17: note = Synthetic
  source 1..17: mol_type = other RNA
tggcggtcgatgcggcc

SEQ ID NO: 19916 - RNA, 17 nt, synthetic construct
  misc_feature 1..17: note = Synthetic
  source 1..17: mol_type = other RNA
ctcctggcggtgcgtgt

SEQ ID NO: 19917 - RNA, 20 nt, synthetic construct
  misc_feature 1..20: note = Synthetic
  source 1..20: mol_type = other RNA
ccttggcggtcgatgcggcc

SEQ ID NO: 19918 - RNA, 20 nt, synthetic construct
  misc_feature 1..20: note = Synthetic
  source 1..20: mol_type = other RNA
cggggcggggtcccccaggg
